(19) United States
(12) Patent Application Publication
(10) Pub. No.: US 2002/0115057 A1
(43) Pub. Date: Aug. 22, 2002

(54) Process for identifying anti-cancer therapeutic agents using cancer gene sets

(76) Inventor: Paul Young, Gaithersburg, MD (US)

Correspondence Address: CARELLA, BYRNE, BAIN, GILFILLAN,, CECCHI, STEWART & OLSTEIN, 6 Becker Farm Road, Roseland, NJ, 07068, US

(21) Appl. No.: 09/954,456

(22) Filed: Sep. 18, 2001

Related U.S. Application Data
(60) Provisional application No. 60/233,617, filed on Sep. 18, 2000.
(60) Provisional application No. 60/234,052, filed on Sep. 20, 2000.
(60) Provisional application No. 60/234,923, filed on Sep. 25, 2000.
(60) Provisional application No. 60/235,134, filed on Sep. 25, 2000.
(60) Provisional application No. 60/235,637, filed on Sep. 26, 2000.
(60) Provisional application No. 60/235,638, filed on Sep. 26, 2000.
(60) Provisional application No. 60/235,711, filed on Sep. 27, 2000.
(60) Provisional application No. 60/235,720, filed on Sep. 27, 2000.
(60) Provisional application No. 60/235,840, filed on Sep. 27, 2000.
(60) Provisional application No. 60/235,863, filed on Sep. 27, 2000.

(51) Int. Cl. C12Q 1/00; C12Q 1/68

(52) U.S. Cl. 435/4; 435/6

(57) ABSTRACT

Processes for assaying potential antitumor agents based on their modulation of the expression of specified genes, or sets, of suspected cancer cell genes, especially for lung cancer, are disclosed, along with methods for diagnosing cancerous, or potentially cancerous, conditions as a result of the expression, or patterns of expression, of such genes, or sets of genes. Also disclosed are methods for determining functionally related genes, or gene sets, as well as methods for treating cancer based on targeting expression products of such genes, or gene sets, and determining genes involved in the cancerous process.

[0001] This application claims priority of U.S. Provisional Application No. 60/233,617, filed Sep. 18, 2000; No. 60/234,052, filed Sep. 20, 2000; No. 60/234,923, filed Sep. 25, 2000; No. 60/235,134, filed Sep. 25, 2000; No. 60/235,637, filed Sep. 26, 2000; No. 60/235,638, filed Sep. 26, 2000; No. 60/235,711, filed Sep. 27, 2000; No. 60/235,720, filed Sep. 27, 2000; No. 60/235,840, filed Sep. 27, 2000; No. 60/235,863, filed Sep. 27, 2000, the disclosures of all of which are hereby incorporated by reference in their entirety.

### FIELD OF THE INVENTION

[0002] The present invention relates to methods of assaying potential anti-tumor agents based on their modulation of the expression of specified sets of genes and methods for diagnosing cancerous, or potentially cancerous, conditions as a result of the patterns of expression of such genes.

### BACKGROUND OF THE INVENTION

[0003] Screening assays for novel drugs are based on the response of model cell based systems in vitro to treatment with specific compounds. Various measures of cellular response have been utilized, including the release of cytokines, alterations in cell surface markers, activation of specific enzymes, as well as alterations in ion flux and/or pH. Some such screens rely on specific genes, such as oncogenes (or gene mutations).

### BRIEF SUMMARY OF THE INVENTION

[0004] In accordance with the present invention, there are provided characteristic sets of gene sequences whose expression, or non-expression, or change in expression, either an increase or decrease thereof, are indicative of the cancerous or non-cancerous status of a given cell. More particularly, such genes whose expression is changed in cancerous, as compared to non-cancerous cells, from a specific tissue (in particular, lung) are genes that include one of the nucleotide sequences of SEQ ID NO: 1-2276, or sequences that are substantially identical to, or incorporated within, said sequences. Such a change in expression may be an increase or a decrease in expression or activity of the gene or gene sequences disclosed herein.

[0005] It is another object of the present invention to provide methods of using such characteristic, or signature, gene sets as a basis for assaying the potential ability of selected chemical agents to modulate upward or downward the expression of said characteristic, or signature, gene sets.

[0006] It is a further object of the present invention to provide methods of detecting the expression, or non-expression, or amount of expression, of said characteristic, or signature, gene sets, or portions thereof, as a means of determining the cancerous, or non-cancerous, status (or potential cancerous status) of selected cells as grown in culture or as maintained in situ.

[0007] It is a still further object of the present invention to provide methods for treating cancerous conditions utilizing selected chemical agents as determined from their ability to modulate (i.e., increase or decrease) the selected characteristic, or signature, gene sets as disclosed herein, where said genes include, or comprise, one of the sequences of SEQ ID NO: 1-2276, or sequences substantially identical to said sequences, or portions of said sequences.

[0008] In one aspect, the present invention relates to a process for identifying an agent that modulates the activity of a cancer-related gene comprising:

[0009] (a) contacting a compound with a cell containing a gene corresponding to (i.e., that encodes an RNA at least 95% identical to the RNA encoded by) a polynucleotide having a sequence selected from the group consisting of SEQ ID NO: 1-2276 and under conditions promoting the expression of said gene; and

[0010] (b) detecting a difference in expression of said gene relative to when said compound is not present

[0011] thereby identifying an agent that modulates the activity of a cancer-related gene.

[0012] The present invention also relates to a process for identifying an anti-neoplastic agent comprising contacting a cell exhibiting neoplastic activity with a compound first identified as a cancer-related gene modulator using an assay process as disclosed herein for determining gene modulating activity and detecting a decrease in said neoplastic activity after said contacting compared to when said contacting does not occur.

[0013] In a further aspect, the present invention relates to a process for identifying an anti-neoplastic agent comprising administering to an animal exhibiting a cancerous condition an effective amount of an agent first identified according to a process as disclosed herein and detecting a decrease in said cancerous condition thereby identifying such an agent, said decrease including the death of said cell or cells.

[0014] The present invention also relates to a process for determining the cancerous status of a cell, comprising determining the level of expression in said cell of at least one gene that corresponds to (i.e., encodes an RNA at least 95% identical to the RNA encoded by) a polynucleotide having a sequence selected from the group consisting of SEQ ID NO: 1-2276 wherein an elevated expression relative to a known non-cancerous cell when the sequence is one of SEQ ID NO: 1-92, 544-809, and 1189-1850 or a reduced expression relative to a known non-cancerous cell when the sequence is one of SEQ ID NO: 93-543, 810-1188, and 1851-2276 indicates a cancerous state or potentially cancerous state. Such sequence identity may include 100 percent identical as defined herein and any number of such genes may be used.

[0015] In an additional aspect, the present invention relates to a process for determining a cancer initiating or facilitating gene comprising contacting a cell with an agent that decreases the expression of a gene that encodes an RNA at least 95% identical to an RNA encoded by a polynucleotide having a sequence selected from the group consisting of SEQ ID NO: 1-92, 544-809, and 1189-1850 and detecting a decrease in expression of said gene compared to when said agent is not present, thereby identifying said gene as being a cancer initiating or facilitating gene. Such genes may, of course, be oncogenes and said decrease in expression may be due to a decrease in copy number of said gene in said cell or a cell derived from said cell, such as where copy number is reduced in cells formed by replication of said cells.

[0016] The present invention also relates to a process for determining if a test gene is a cancer suppressor gene comprising contacting a cell expressing said test gene with an agent that increases the expression of a gene that corresponds to a polynucleotide having a sequence selected from the group consisting of SEQ ID NO: 93-543, 810-1188, and 1851-2276 and detecting a decrease in expression of said test gene compared to when said agent is not present, thereby identifying said test gene as being a cancer suppressor gene. The sequence identity may include identical sequences, as defined herein, and such a process includes embodiments wherein the increase in expression is due to an increase in copy number of the gene in said cell or a cell derived from said cell, such as following cellular replication.

[0017] In another aspect, the present invention relates to a process for treating cancer comprising contacting a cancerous cell with an agent having activity against an expression product encoded by a gene sequence selected from the group consisting of SEQ ID NO: 1-92, 544-809, and 1189-1850. Such a process includes an embodiment wherein the cancerous cell is contacted in vivo. The agent may include an antibody.

[0018] The present invention also relates to a method for producing a product comprising identifying an agent according to the assay processes of the invention wherein said product is the data collected with respect to said agent as a result of said process and wherein said data is sufficient to convey the chemical structure and/or properties of said agent.

[0019] The present invention further relates to a process for treating a cancerous condition in an animal afflicted therewith comprising administering to said animal a therapeutically effective amount of an agent first identified as having anti-neoplastic activity using one or more of the processes of the invention.

[0020] In a further aspect, the present invention relates to a process for protecting an animal against cancer comprising administering to an animal at risk of developing cancer a therapeutically effective amount of an agent first identified as having anti-neoplastic activity using one or more of the processes disclosed herein.

### DETAILED SUMMARY OF THE INVENTION

[0021] The present invention relates to methods of assaying for potential antitumor agents based on their modulation of the expression of specified sets of genes and methods for diagnosing cancerous, or potentially cancerous, conditions as a result of the patterns of expression of such gene sets and for determining cancer-inducing or regulating genes, and gene sets, based on common expression or regulation of such genes, or gene sets.

[0022] In accordance with the present invention, model cellular systems using cell lines, primary cells, or tissue samples are maintained in growth medium and may be treated with compounds that may be at a single concentration or at a range of concentrations. At specific times after treatment, cellular RNAs are isolated from the treated cells, primary cells or tumors, which RNAs are indicative of expression of selected genes. The cellular RNA is then divided and subjected to analysis that detects the presence and/or quantity of specific RNA transcripts, which transcripts may then be amplified for detection purposes using standard methodologies, such as, for example, reverse transcriptase polymerase chain reaction (RT-PCR), etc. The presence or absence, or levels, of specific RNA transcripts are determined from these measurements and a metric derived for the type and degree of response of the sample to the treated compound compared to control samples.

[0023] Also in accordance with the present invention, there are disclosed herein characteristic, or signature, sets of genes and gene sequences whose expression is, or can be, as a result of the methods of the present invention, linked to, or used to characterize, the cancerous, or non-cancerous, status of the cells, or tissues, to be tested, especially tissues derived from lung (i.e., cancer-related genes and gene sequences). Thus, the methods of the present invention identify novel anti-neoplastic agents based on their alteration of expression of small sets of characteristic, or indicator, or signature genes in specific model systems. The methods of the invention may therefore be used with a variety of cell lines or with primary samples from tumors maintained in vitro under suitable culture conditions for varying periods of time, or in situ in suitable animal models.

[0024] More particularly, certain genes have been identified that are expressed at levels in cancer cells that are different than the expression levels in non-cancer cells. In one instance, the identified genes are expressed at higher levels in cancer cells than in normal cells. In another instance, the identified genes are expressed at lower levels in cancer cells as compared to normal cells.

[0025] In accordance with the foregoing, the present invention relates to a process for determining the cancerous status of a cell, comprising determining the level of expression in said cell of at least one gene that encodes an RNA at least 95% identical to the RNA encoded by a polynucleotide having a sequence selected from the group consisting of SEQ ID NO: 1-2276 wherein an elevated expression relative to a known non-cancerous cell when the sequence is one of SEQ ID NO: 1-92, 544-809, and 1189-1850 or a reduced expression relative to a known non-cancerous cell when the sequence is one of SEQ ID NO: 93-543, 810-1188, and 1851-2276 indicates a cancerous state or potentially cancerous state. Such sequence identity may include 100 percent identical as defined herein and any number of such genes may be used.

[0026] Thus, the present invention also relates to a process for identifying an anti-neoplastic agent comprising contacting a cell exhibiting neoplastic activity with a compound first identified as a cancer-related gene modulator using an assay process as disclosed herein for determining gene modulating activity and detecting a decrease in said neoplastic activity after said contacting compared to when said contacting does not occur (i.e., comparing expression when said agent is present versus when said agent is not present).

[0027] In a further aspect, the present invention relates to a process for identifying an anti-neoplastic agent comprising administering to an animal exhibiting a cancerous condition an effective amount of an agent first identified according to a process as disclosed herein and detecting a decrease in said cancerous condition thereby identifying such an agent.

[0028] It should be kept in mind that the anti-tumor or anti-neoplastic agents identified by the processes of the invention include both novel agents whose structure and anti-tumor activity were not previously known prior to identification of their activity by the processes herein as well as non-novel agents, whose structure was known but whose therapeutic value as anti-tumor agents was not appreciated prior to identification by the assay processes of the invention.

[0029] In accordance with the foregoing, the present invention relates to a process for screening for an anti-neoplastic agent comprising the steps of:

[0030] (a) contacting a compound with a cell containing a polynucleotide comprising a nucleotide sequence selected from the group consisting of SEQ ID NO: 1-2276, or a sequence at least 90% identical thereto, under conditions wherein said polynucleotide is being expressed, and

[0031] (b) determining a change in expression of at least one of said polynucleotides,

[0032] wherein a change in expression is indicative of anti-neoplastic activity.

[0033] In particular embodiments, such change in expression may be an increase or a decrease in expression or activity.

[0034] More particularly, the present invention relates to a process for screening for an anti-neoplastic agent comprising the steps of:

[0035] (a) exposing a known cancerous cell to a chemical agent to be tested for antineoplastic activity;

[0036] (b) allowing said chemical agent to modulate the activity of one or more genes present in said cell wherein said genes include or comprise one of the sequences selected from the group consisting of the sequences of SEQ ID NO: 1 -2276, sequences substantially identical to said sequences, or the complements of any of the foregoing;

[0037] (c) determining the expression of one or more genes of step (b);

[0038] (d) comparing the expression of said genes in the presence or absence of exposure to said chemical agent;

[0039] wherein a difference in expression is indicative of the ability of anti-neoplastic activity.

[0040] Thus, in one aspect, the present invention relates to a process for identifying an agent that modulates the activity of a cancer-related gene comprising:

[0041] (a) contacting a compound with a cell containing a gene that corresponds to (i.e., encodes an RNA at least 95% identical to the RNA encoded by) a polynucleotide having a sequence selected from the group consisting of SEQ ID NO: 1-2276 and under conditions promoting the expression of said gene; and

[0042] (b) detecting a difference in expression of said gene relative to when said compound is not present

[0043] thereby identifying an agent that modulates the activity of a cancer-related gene.

[0044] Such sequence identity includes embodiments wherein the RNAs are at least 97 or 98% identical in sequence and include cases where the sequence is the same, thus where a gene encodes an RNA with the same nucleotide sequence as an RNA encoded by one of the sequences of SEQ ID NO: 1-2276.

[0045] In one embodiment of such processes, the sequence is selected from SEQ ID NO: 1-1-92, 544-809, and 1189-1850 and said difference in expression is a decrease in expression. Here, the gene used encodes an RNA like that encoded by one of the sequences found to be expressed at an elevated level in lung cancer cells. In another such embodiment, the sequence is selected from SEQ ID NO: 93-543, 810-1188, and 1851-2276 and said difference in expression is an increase in expression. The latter sequences encode RNAs found to be expressed at higher levels in normal cells as opposed to cancer cells.

[0046] In specific embodiments of the present invention, said chemical agent to be tested modulates the expression of more than one said gene, especially where it modulates at least two said genes, more especially where at least 3, or at least 5 of said genes, or even 10 or more of said genes in said signature set, are modulated. In a preferred embodiment, more than 10 (such as 20, 50 or 100) or even all of said genes are modulated.

[0047] In one embodiment of the present invention, said gene modulation is downward modulation, so that, as a result of exposure to the chemical agent to be tested, one or more genes of the cancerous cell will be expressed at a lower level (or not expressed at all) when exposed to the agent as compared to the expression when not exposed to the agent (i.e., when said agent is not present).

[0048] In a preferred embodiment a selected set of said genes are expressed in the reference cell but not expressed in the cell to be tested as a result of the contacting or exposure of the cell with/to the chemical agent. Thus, where said chemical agent causes the gene, or genes, of the tested cell to be expressed at a lower level than the same genes of the reference cell, this is indicative of downward modulation and indicates that the chemical agent to be tested has anti-neoplastic activity (or activity in reducing expression of such cancer-related genes).

[0049] In a separate embodiment, exposure of said cells to be tested to the chemical agent, especially one suspected of having anti-neoplastic activity, may result in upward modulation of said genes of the cell to be tested. Such upward modulation is interpreted as meaning that said genes are expressed where previously not expressed, or else are expressed in greater quantities, or at higher levels, when exposed to the agent as compared to non-exposure to the agent. Such upward modulation may be taken as indicative of anti-neoplastic activity by the tested chemical agent(s) of the gene, or genes, so modulated resulting in lower neoplastic activity on the part of such cells, such as where increased expression of the gene, or genes, results in decreased growth and/or increased differentiation of said cells away from the cancerous state.

[0050] The genes useful in the assay processes include, respectively, as a part thereof at least one of the sequences selected from the group consisting of the sequences of SEQ ID NO: 1-2276, or sequences substantially identical thereto. Such sequences also include sequences complementary to any of the sequences disclosed herein.

[0051] The genes identified by the present disclosure are considered “cancer-related” genes, as this term is used herein, and includes genes expressed at higher levels (due, for example, to elevated rates of expression, elevated extent of expression or increased copy number) in cancer cells relative to expression of these genes in normal (i.e., non-cancerous) cells where said cancerous state or status of test cells or tissues has been determined by methods known in the art, such as by reverse transcriptase polymerase chain reaction (RT-PCR) as described in the Example below. In specific embodiments, this relates to the genes whose sequences correspond to the sequences of SEQ ID NO: 1-92, 544-809, and 1189-1850. Also specifically contemplated are genes whose expression is higher in normal as opposed to known cancer cells (as determined by other means, such as uncontrolled growth, change in antigenic surface proteins, genetic mutation, and the like) such that the decreased expression in cancer cells may be indicative or, or contributory to, the realization of the cancerous state. In specific embodiments thereof, this relates to the genes whose sequences correspond to the sequences of SEQ ID NO: 93-543, 810-1188, and 1851-2276 disclosed herein. As used herein, the term “correspond” means that the gene has the indicated nucleotide sequence or that it encodes substantially the same RNA as would be encoded by the indicated sequence, the term “substantially” meaning about at least 90% identical as defined elsewhere herein.

[0052] The sequences disclosed herein may be genomic in nature and thus represent the sequence of an actual gene, such as a human gene, or may be a cDNA sequence derived from a messenger RNA (mRNA) and thus represent contiguous exonic sequences derived from a corresponding genomic sequence. As described in the Example, the expression of these cancer-related genes is determined from the relative expression levels of the RNA complement of a cancerous cell relative to a normal (i.e., non-cancerous) cell. Because of the processing that may take place in transforming the initial RNA transcript into the final mRNA, the sequences disclosed herein may represent less than the full genomic sequence. They may also represent sequences derived from ribosomal and transfer RNAs. Consequently, the genes present in the cell (and representing the genomic sequences) and the sequences disclosed herein, which are mostly cDNA sequences, may be identical or may be such that the cDNAs contain less than the full genomic sequence. Such genes and cDNA sequences are still considered corresponding sequences because they both encode similar RNA sequences. Thus, by way of non-limiting example only, a gene that encodes an RNA transcript, which is then processed into a shorter mRNA, is deemed to encode both such RNAs and therefore encodes an RNA complementary to (using the usual Watson-Crick complementarity rules), or that would otherwise be encoded by, a cDNA (for example, a sequence as disclosed herein). Thus, the sequences disclosed herein correspond to genes contained in the cancerous or normal cells used to determine relative levels of expression because they represent the same sequences or are complementary to RNAs encoded by these genes. Such genes are also deemed to include different alleles that may occur in the cells used in the processes of the invention.

[0053] The genes of the invention correspond to a polynucleotide having a sequence of SEQ ID NO: 1-1392 if the gene encodes an RNA (processed or unprocessed) that is at least 90% identical, preferably at least 95% identical, most preferably at least 98% identical to, and especially identical to, an RNA that would be encoded by, or be complementary to, such as by hybridization with, a polynucleotide having the indicated sequence. In addition, genes including sequences at least 90% identical to a sequence selected from SEQ ID NO: 1-2276, preferably at least about 95% identical to such a sequence, more preferably at least about 98% identical to such sequence and most preferably comprising such sequence are specifically contemplated by all of the processes of the present invention. In addition, sequences encoding the same proteins (where said sequences encode a protein) as any of these sequences, regardless of the percent identity of such sequences, are also specifically contemplated by any of the methods of the present invention that rely on any or all of said sequences, regardless of how they are otherwise described or limited. Thus, any such sequences are available for use in carrying out any of the methods disclosed according to the invention. Such sequences also include any open reading frames, or promoter sequences, as defined herein, present within any of the sequences of SEQ ID NO: 1-2276.

[0054] Further in accordance with the present invention, the term “percent identity” or “percent identical,” when referring to a sequence, means that a sequence is compared to a claimed or described sequence after alignment of the sequence to be compared (the “Compared Sequence”) with the described or claimed sequence (the “Reference Sequence”). The Percent Identity is then determined according to the following formula:

Percent Identity=100[1−(C/R)]

[0055] wherein C is the number of differences between the Reference Sequence and the Compared Sequence over the length of alignment between the Reference Sequence and the Compared Sequence wherein (i) each base or amino acid in the Reference Sequence that does not have a corresponding aligned base or amino acid in the Compared Sequence and (ii) each gap in the Reference Sequence and (iii) each aligned base or amino acid in the Reference Sequence that is different from an aligned base or amino acid in the Compared Sequence, constitutes a difference; and R is the number of bases or amino acids in the Reference Sequence over the length of the alignment with the Compared Sequence with any gap created in the Reference Sequence also being counted as a base or amino acid.

[0056] If an alignment exists between the Compared Sequence and the Reference Sequence for which the percent identity as calculated above is about equal to or greater than a specified minimum Percent Identity then the Compared Sequence has the specified minimum percent identity to the Reference Sequence even though alignments may exist in which the hereinabove calculated Percent Identity is less than the specified Percent Identity.

[0057] As used herein, the terms “portion,” “segment,” and “fragment,” when used in relation to polypeptides, refer to a continuous sequence of nucleotide residues, which sequence forms a subset of a larger sequence. Such terms include the products produced by treatment of said polynucleotides with any of the common endonucleases, or any stretch of polynucleotides that could be synthetically synthesized. These may include exonic or intronic sequences of the corresponding genes.

[0058] As used herein and except as noted otherwise, all terms are defined as given below.

[0059] In accordance with the present invention, the term “DNA segment” or “DNA sequence” refers to a DNA polymer, in the form of a separate fragment or as a component of a larger DNA construct, which has been derived from DNA isolated at least once in substantially pure form, i.e., free of contaminating endogenous materials and in a quantity or concentration enabling identification, manipulation, and recovery of the segment and its component nucleotide sequences by standard biochemical methods, for example, using a cloning vector. Such segments are provided in the form of an open reading frame uninterrupted by internal nontranslated sequences, or introns, which are typically present in eukaryotic genes. Sequences of non-translated DNA may be present downstream from the open reading frame, where the same do not interfere with manipulation or expression of the coding regions.

[0060] The term “coding region” refers to that portion of a gene which either naturally or normally codes for the expression product of that gene in its natural genomic environment, i.e., the region coding in vivo for the native expression product of the gene. The coding region can be from a normal, mutated or altered gene, or can even be from a DNA sequence, or gene, wholly synthesized in the laboratory using methods well known to those of skill in the art of DNA synthesis.

[0061] In accordance with the present invention, the term “nucleotide sequence” refers to a heteropolymer of deoxyribonucleotides.

[0062] The term “expression product” means that polypeptide or protein that is the natural translation product of the gene and any nucleic acid sequence encoding equivalents resulting from genetic code degeneracy and thus coding for the same amino acid(s).

[0063] The term “fragment,” when referring to a coding sequence, means a portion of DNA comprising less than the complete coding region whose expression product retains essentially the same biological function or activity as the expression product of the complete coding region.

[0064] The term “primer” means a short nucleic acid sequence that is paired with one strand of DNA and provides a free 3′-OH end at which a DNA polymerase starts synthesis of a deoxyribonucleotide chain (including PCR primers).

[0065] The term “promoter” means a region of DNA involved in binding of RNA polymerase to initiate transcription. The term “enhancer” refers to a region of DNA that, when present and active, has the effect of increasing expression of a different DNA sequence that is being expressed, thereby increasing the amount of expression product formed from said different DNA sequence.

[0066] The term “open reading frame (ORF)” means a series of triplets coding for amino acids without any termination codons and is a sequence (potentially) translatable into protein.

[0067] As used herein, reference to a DNA sequence includes both single stranded and double stranded DNA. Thus, the specific sequence, unless the context indicates otherwise, refers to the single strand DNA of such sequence, the duplex of such sequence with its complement (double stranded DNA) and the complement of such sequence.

[0068] In carrying out the assays of the invention, relative antineoplastic activity may be ascertained by the extent to which a given chemical agent modulates the expression of genes present in a cancerous cell. Thus, a first chemical agent that modulates the expression of a gene associated with the cancerous state (i.e., a gene that includes one of the sequences disclosed herein and present in cancerous cells) to a larger degree than a second chemical agent tested by the assays of the invention is thereby deemed to have higher, or more desirable, or more advantageous, anti-neoplastic activity than said second chemical agent. Alternatively, where first and second chemical agents modulate expression of more than one of said genes, but where the second modulates expression of, for example, five said genes, whereas the first modulates expression of only three of said genes, especially where the three form a subset of the five, then the second chemical agent is deemed a more potent anti-neoplastic agent than the first. Such anti-neoplastic activity, as determined using the assays of the present invention, may necessarily include combinations of the foregoing possibilities, which are in no way to be considered limiting.

[0069] In utilizing these gene sequences for the assays according to the invention, the genes whose activity is to be determined with and without the presence of the compound to be evaluated for antitumor activity may be any one, or several, or any combination of the gene sequences disclosed herein as SEQ ID NO: 1-2276. However, how the gene sequences are employed in such assays depends on the pattern of gene expression disclosed for the signature sets. For example, a sequence that is expressed in cancerous cells but not in normal cells will identify a potential anticancer agent by that agent's ability to decrease expression of the sequence, or sequences, in tumor cells. Conversely, a sequence, or sequences, expressed in normal but not tumor cells will identify a potential antitumor agent by its ability to increase expression of those genes in the tumor cells. The same relationship holds true where the sequences are expressed in both cancer and normal cells but are expressed at a higher level in one than in the other, and vice versa. Based on the expression patterns disclosed for the gene sequences and signature sets disclosed herein, it should be readily apparent to those skilled in the art how to conduct assays for potential antitumor agents using the signature gene sets. The same holds true where the sequences, or signature gene sets, are utilized to determine the cancerous state of a cell or use of an agent to treat a cancerous condition.

[0070] Thus, in one aspect, the present invention relates to a process for screening for an anti-neoplastic agent comprising the steps of (a) exposing cells to a chemical agent to be tested for antineoplastic activity, and (b) determining a change in expression of at least one gene of a signature gene set, or a sequence that is at least 95% identical thereto, wherein a change in expression is indicative of anti-neoplastic activity. Such change in expression is intended to mean a change that includes any activity of the gene, and may be an increase or decrease thereof. In addition, such change in activity may be a change in expression or other activity of at least 1 such gene, such as 5 or 10, or more of the genes of a signature set, even as many as half of such genes or even of all of the genes of a particular gene set.

[0071] The gene expression to be measured is commonly assayed using RNA expression as an indicator. Thus, the greater the level of RNA (such as messenger RNA) detected the higher the level of expression of the corresponding gene. Gene expression, either absolute or relative, such as where the expression of several different genes are being quantitatively evaluated and compared, for example, where chemical agents modulate the expression of more than one gene, such as a set of 3, 4, 5, or more genes, is determined by the relative expression of the RNAs encoded by such genes.

[0072] RNA may be isolated from samples in a variety of ways, including lysis and denaturation with a phenolic solution containing a chaotropic agent (e.g., triazol) followed by isopropanol precipitation, ethanol wash, and resuspension in aqueous solution; or lysis and denaturation followed by isolation on solid support, such as a Qiagen resin and reconstitution in aqueous solution; or lysis and denaturation in non-phenolic, aqueous solutions followed by enzymatic conversion of RNA to DNA template copies.

[0073] Normally, prior to applying the processes of the invention, steady state RNA expression levels for the genes, and sets of genes, disclosed herein will have been obtained. It is the steady state level of such expression that is affected by potential anti-neoplastic agents as determined herein. Such steady state levels of expression are easily determined by any methods that are sensitive, specific and accurate. Such methods include, but are in no way limited to, real time quantitative polymerase chain reaction (PCR), for example, using a Perkin-Elmer 7700 sequence detection system with gene specific primer probe combinations as designed using any of several commercially available software packages, such as Primer Express software, solid support based hybridization array technology using appropriate internal controls for quantitation, including filter, bead, or microchip based arrays, solid support based hybridization arrays using, for example, chemiluminescent, fluorescent, or electrochemical reaction based detection systems.

[0074] In one embodiment of the present invention, a set of genes useful in evaluating, or screening, or otherwise assaying, one or more chemical agents for anti-neoplastic activity in the assays disclosed herein will have already been shown to have differences in the ratios of steady state RNA levels in cancer cells, or tissues, relative to normal, or non-tumorous cells or tissues, or will have exhibited differences in the expression ratios in tumor samples compared to normal samples between genes in a given subset of the set of genes disclosed herein, or will have gene expression that has increased from undetectable levels to detectable levels, or vice versa, as the case may be, especially where sensitive detection methods are employed, or conversely will have decreased from detectable levels to undetectable levels with such procedures, especially sensitive procedures.

[0075] The genes, and gene sequences, useful in practicing the methods of the present invention are genes that are found to be selectively expressed in, or not expressed in, cancer cells as compared to non-cancer cells, or in which expression is down-regulated or up-regulated, as the case may be, in cancerous cells as compared to non-cancerous cells. Thus, these may include genes, or sets of genes, expressed in cancer cells but absent from, or inactive in, non-cancerous cells, or may include genes, or sets of genes, expressed in non-cancerous cells, but not expressed in cancer cells. Alternatively, the genes useful in practicing the present invention may be more expressed, or less expressed, in a cancerous cell relative to a non-cancerous cell. Such genes are generally those comprising the sequences of SEQ ID NO: 1-2276, with SEQ ID NO: 1-92, 544-809, 1189-1850 exhibiting elevated expression in cancer cells relative to normal cells and vice versa for SEQ ID NO: 93-543, 810-1188, 1851-2276.

[0076] In accordance with the foregoing, the present invention further relates to a process for determining the cancerous status of a test cell, comprising determining expression in said test cell of at least one gene that includes one of the nucleotide sequences selected from the sequences of SEQ ID NO: 1-2276, or a nucleotide sequence that is at least 95% identical thereto, and then comparing said expression to expression of said at least one gene in at least one cell known to be non-cancerous whereby a difference in said expression indicates that said cell is cancerous.

[0077] In a particular embodiment, the present invention is directed to a process for determining the cancerous status of a cell to be tested, comprising determining the presence in said cell of at least one gene that includes one of the nucleotide sequences selected from the sequences of SEQ ID NO: 1-2276, including sequences having substantial identity homologous to said sequences, or characteristic fragments thereof, or the complements of any of the foregoing and then comparing the pattern of said gene presence and/or absence with that found for a cell known, or believed, to be non-cancerous, or normal, at least with respect to its genetic complement.

[0078] With respect to genes that include at least one of the sequences of SEQ ID NO: 1-92, 544-809, 1189-1850, up regulation of expression in cancer cells (as compared to non-cancer cells, which may lack said genes, or said gene expression, altogether) is indicative of a cancerous, or potentially cancerous, condition.

[0079] In specific embodiments, the present invention relates to embodiments wherein the genetic pattern is the modulation of expression of more than one gene, preferably 3, 4, or 5 genes, and even includes patterns where there is a modulation of expression of as many as 10, or more, genes. Thus, where a genetic pattern is the modulation of expression of 5 genes in a cancerous cell as compared to a non-cancerous cell from the same tissue type, such as a cancerous lung cell, versus a non-cancerous cell of lung, such a pattern indicates a likelihood that such genes (i.e., the modulation of expression of those 5 genes) is an indicator of cancerous status and thereby provides a means of diagnosing a cancerous, or potentially cancerous, status. The absence of a specific set of genes from cancerous cells where said genes are present in otherwise normal cells, especially those of a similar type, is also indicative of a correlation with the cancerous state and thus can likewise be used as a means of diagnosing the cancerous state in other cells suspected of being cancerous.

[0080] In a particular embodiment, the gene sequences as disclosed herein are indicative of the cancerous or normal state of lung tissues. This includes, in specific embodiments, SEQ ID NO: 1-2276, wherein SEQ ID NO: 1-92 represent genes or gene sequences expressed in lung adenocarcinoma that are not expressed at appreciable levels in normal lung cells, wherein SEQ ID NO: 93-295 represent genes or gene sequences expressed in normal lung cells that are not expressed at appreciable levels in lung adenocarcinoma, wherein SEQ ID NO: 296-543 represent genes or gene sequences expressed in non-cancerous lung tissue that are not expressed at appreciable levels in malignant lung samples, wherein SEQ ID NO: 544-750 represent genes or gene sequences expressed in malignant lung samples that are not expressed at appreciable levels in non-malignant lung cells, wherein SEQ ID NO: 751-809 represent genes or gene sequences expressed in both normal and malignant lung adenocarcinoma but are up-regulated by at least about 2 fold in lung adenocarcinoma, wherein SEQ ID NO: 810-953 represent genes or gene sequences expressed at appreciable levels in normal lung samples but are not typically expressed in lung squamous cell carcinoma, wherein SEQ ID NO: 954-1188 represent genes or gene sequences expressed in normal lung tissue but not ordinarily expressed in neuroendocrine carcinoma of the lung, wherein SEQ ID NO: 1189-1607 represent genes or gene sequences expressed at appreciable levels in lung neuroendocrine carcinoma that are not expressed at detectable levels in normal lung, wherein SEQ ID NO: 1608-1850 represent genes or gene sequences expressed in lung squamous cell carcinoma that are not expressed at detectable levels in normal lung, and wherein SEQ ID NO: 1851-2276 represent genes or gene sequences expressed in normal lung and lung adenocarcinoma but are down-regulated or under-expressed in lung adenocarcinoma relative to normal lung tissues.

[0081] The gene patterns indicative of a cancerous state need not be characteristic of every cell found to be cancerous. Thus, the methods disclosed herein are useful for detecting the presence of a cancerous condition within a tissue where less than all cells exhibit the complete pattern. For example, a set of selected genes, comprising sequences homologous under stringent conditions, or at least 90%, preferably 95%, identical to at least one of the sequences of SEQ ID NO: 1-92, 544-809, 1189-1850, and wherein the signature set is comprised of genes expressed and/or up-regulated in cancer cells relative to normal cells, as disclosed above for the signature gene sets used for practicing the invention, may be found, using appropriate probes, either DNA or RNA, to be present in as little as 60% of cells derived from a sample of tumorous, or malignant, tissue while being absent from as much as 60% of cells derived from corresponding non-cancerous, or otherwise normal, tissue (and thus being present in as much as 40% of such normal tissue cells). In a preferred embodiment, such gene pattern is found to be present in at least 70% of cells drawn from a cancerous tissue and absent from at least 70% of a corresponding normal, non-cancerous, tissue sample. In an especially preferred embodiment, such gene pattern is found to be present in at least 80% of cells drawn from a cancerous tissue and absent from at least 80% of a corresponding normal, non-cancerous, tissue sample. In a most preferred embodiment, such gene pattern is found to be present in at least 90% of cells drawn from a cancerous tissue and absent from at least 90% of a corresponding normal, non-cancerous, tissue sample. In an additional embodiment, such gene pattern is found to be present in at least 100% of cells drawn from a cancerous tissue and absent from at least 100% of a corresponding normal, non-cancerous, tissue sample, although the latter embodiment may represent a rare occurrence.

[0082] Conversely, where the signature set (such as SEQ ID NO: 93-543, 810-1188, 1851-2276) is expressed or up-regulated in normal cells versus cancerous cells, as disclosed herein, expression in the normal cells but not in suspected cancerous cells may confirm a cancerous state in the suspected cancerous sample. The same is true for assays disclosed herein for potential antitumor agents.

[0083] Although the presence or absence of expression of one or more selected gene sequences may be indicative of a cancerous status for a given cell, the mere presence or absence of such a gene pattern may not alone be sufficient to achieve a malignant condition and thus the level of expression of such gene pattern may also be a significant factor in determining the attainment of a cancerous state. Thus, while a pattern of gene expression may be present in both cancerous and non-cancerous cells, the relative level of expression, and determined by any of the methods disclosed herein, all of which are well known in the art, may differ between the cancerous versus the non-cancerous cells. Thus, it becomes essential to also determine the level of expression of one or more of said genes as a separate means of diagnosing the presence of a cancerous status for a given cell, groups of cells, or tissues, either in culture or in situ.

[0084] In accordance with the invention disclosed herein, a determination of an anticancer agent using the signature gene sets for lung described herein is based on patterns of modulation of such genes so that increase or decrease in expression of a gene due to the presence of such a potential agent may or may not be meaningful. Thus, the more genes in a gene set that are affected by said agent the more likely said agent is an effective therapeutic agent.

[0085] In addition, different agents may have different abilities to affect the genes of a signature gene set. For example, if a potential therapeutic agent, say, agent A, causes a gene or group of genes of a characteristic or signature gene set, or even all of the genes of said gene set, to exhibit decreased expression, such as where a lower amount of mRNA is expressed from said gene(s), or less protein is produced from said mRNA, but a second potential agent, say, agent B, while modulating the activity of the same or related genes causes said expression to be reduced to half, such as where only half as much mRNA is transcribed or only half as much protein is translated from said mRNA as for agent A, then agent B is considered to have twice as much therapeutic potential as agent A.

[0086] Such modulation or change of activity as determined using the assays disclosed herein may include either an increase or a decrease in activity of said genes or gene sequences. Thus, where a gene is expressed in cancer cells but not in normal cells, or is up-regulated in cancer cells relative to normal cells, of the same organ or tissue type, an agent that down-regulates said gene or genes, or gene sequences, or prevents their expression entirely, is considered a potential antitumor agent within the present disclosure. Conversely, where an agent causes expression of a gene or genes, or gene sequences, expressed in normal cells but not in cancer cells, or where said agent up-regulates a gene or genes, or gene sequences, that are expressed in normal cells but not in cancer cells, or are up-regulated in normal cells but not in cancer cells, of the same organ or tissue type, said agent is considered to be a potential antitumor agent within the present disclosure.

[0087] The present invention also relates to a process that comprises a method for producing a product comprising identifying an agent according to one of the disclosed processes for identifying such an agent (such as the anti-neoplastic agents identified according to the assay procedures disclosed herein) wherein said product is the data collected with respect to said agent as a result of said identification process, or assay, and wherein said data is sufficient to convey the chemical character and/or structure and/or properties of said agent. For example, the present invention specifically contemplates a situation whereby a user of an assay of the invention may use the assay to screen for compounds having the desired enzyme modulating activity and, having identified the compound, then conveys that information (i.e., information as to structure, dosage, etc) to another user who then utilizes the information to reproduce the agent and administer it for therapeutic or research purposes according to the invention. For example, the user of the assay (user 1) may screen a number of test compounds without knowing the structure or identity of the compounds (such as where a number of code numbers are used the first user is simply given samples labeled with said code numbers) and, after performing the screening process, using one or more assay processes of the present invention, then imparts to a second user (user 2), verbally or in writing or some equivalent fashion, sufficient information to identify the compounds having a particular modulating activity (for example, the code number with the corresponding results). This transmission of information from user 1 to user 2 is specifically contemplated by the present invention.

[0088] In accordance with the foregoing, the present invention further relates to a process for determining the cancerous status of a cell to be tested, comprising determining the level of expression in said cell of at least one gene that includes one of the nucleotide sequences selected from the sequences of SEQ ID NO: 1-2276, including sequences substantially identical to said sequences, or characteristic fragments thereof, or the complements of any of the foregoing and then comparing said expression to that of a cell known to be non-cancerous whereby the difference in said expression indicates that said cell to be tested is cancerous.

[0089] In specific embodiments of the present invention, said expression is determined for more than one of said genes, such as 2, 3, 4, 5, or more such genes, considered as a set, and even as many as a set of 10 such genes. A set of genes, for example, 5 such genes, may be found to be expressed at certain levels in cancer cells but are found to be expressed at lower levels (or not expressed at all) in non-cancerous, or normal, cells. Conversely, a set of, for example, 5 such genes may be found to be expressed in normal (i.e., non-cancerous) cells but expressed at lower levels (or not expressed at all) in cancer cells. Thus, by determining the set or pattern of genes expressed in cancer cells but expressed at lower levels (or not at all) in non-cancer, or vice versa, a method is achieved for diagnosing cancerous conditions wherein said genes are selected from those that include one of the sequences, or fragments of sequences, including complementary sequences, selected from SEQ ID NO: 1-2276. Using the methods disclosed herein, lung or other cancers can be readily detected using the methods of the present invention.

[0090] In accordance with the invention, although gene expression for a gene that includes as a portion thereof one of the nucleotide sequences of SEQ ID NO: 1-2276, is preferably determined by use of a probe that is a fragment of such nucleotide sequence, it is to be understood that the probe may be formed from a different portion of the gene. Thus, for each gene of the signature sets of the present invention, the nucleotide sequence disclosed with respect to a specific sequence ID number is only a portion of the nucleotide sequence that encodes expression of the gene. As a result, expression of the gene may be determined by use of a nucleotide probe that hybridizes to messenger RNA (mRNA) transcribed from a portion of the gene other than the specific nucleotide sequence disclosed with reference to a sequence ID number as recited herein.

[0091] The present invention further relates to a process for determining a cancer initiating, facilitating or suppressing gene comprising the steps of contacting a cell with a cancer modulating agent and determining a change in expression of a gene selected from the group consisting of the gene sequences of SEQ ID NO: 1-2276 and thereby identifying said gene as being a cancer initiating or facilitating gene.

[0092] Some or all of the genes within the signature gene sets disclosed herein as SEQ ID NO: 1-2276 are found to play a direct role in the initiation or progression of cancer or even other diseases and disease processes. Because changes in expression of these genes (either up-regulation or down-regulation) are linked to the disease state (i.e. cancer), the change in expression may contribute to the initiation or progression of the disease. For example, if a gene that is up-regulated is an oncogene, or if a gene that is down-regulated is a tumor suppressor, such a gene provides for a means of screening for small molecule therapeutics beyond screens based upon expression output alone. For example, genes that display up-regulation in cancer and whose elevated expression contributes to initiation or progression of disease represent targets in screens for small molecules that inhibit or block their function. Examples include, but are not be limited to, kinase inhibition, cellular proliferation, substrate analogs that block the active site of protein targets, etc. Similarly, genes that display down-regulation in cancer and whose absence results in initiation or progression of disease are valuable therapeutics for gene therapy.

[0093] In accordance therewith, the present invention relates to a process for determining if a test gene is a cancer initiating or facilitating gene comprising contacting a cell expressing the gene of interest (i.e., a gene whose ability to initiate or facilitate a cancerous condition is to be determined) with an agent that decreases the expression of a gene that corresponds to (i.e., encodes an RNA at least 90% identical, or even 95%, 98% or 100% identical, to an RNA encoded by) a polynucleotide having a sequence selected from the group consisting of SEQ ID NO: 1-92, 544-809, 1189-1850 and detecting a decrease in expression of said test gene compared to when said agent is not present, thereby identifying said test gene as being a cancer initiating or facilitating gene. Such genes may, of course, be oncogenes and said decrease in expression may be due to a decrease in copy number of said gene in said cell or a cell derived from said cell, such as where copy number is reduced following cellular replication.

[0094] The present invention also relates to a process for determining if a test gene (i.e., a gene whose ability to initiate or facilitate a cancerous condition is to be determined)is a cancer suppressor gene comprising contacting a cell with an agent that increases the expression of a gene that corresponds to (i.e., encodes an RNA at least 90%, perhaps 95% or even 98% or 100%, identical to an RNA encoded by) a polynucleotide having a sequence selected from the group consisting of SEQ ID NO: 93-543, 810-1188, 1851-2276 and detecting an increase in expression of said test gene compared to when said agent is not present, thereby identifying said test gene as a cancer suppressor gene. The sequence identity may include identical sequences, as defined herein, and such a process includes embodiments wherein the increase in expression is due to an increase in copy number of the gene in said cell or a cell derived from said cell, such as by cellular replication.

[0095] It should be noted that there are a variety of different contexts in which genes have been evaluated as being involved in the cancerous process. Thus, some genes may be oncogenes and encode proteins that are directly involved in the cancerous process and thereby promote the occurrence of cancer in an animal. In addition, other genes may serve to suppress the cancerous state in a given cell or cell type and thereby work against a cancerous condition forming in an animal. Other genes may simply be involved either directly or indirectly in the cancerous process or condition and may serve in an ancillary capacity with respect to the cancerous state. All such types of genes are deemed with those to be determined in accordance with the invention as disclosed herein. Thus, the gene determined by said process of the invention may be an oncogene, or the gene determined by said process may be a cancer facilitating gene, the latter including a gene that directly or indirectly affects the cancerous process, either in the promotion of a cancerous condition or in facilitating the progress of cancerous growth or otherwise modulating the growth of cancer cells, either in vivo or ex vivo. In addition, the gene determined by said process may be a cancer suppressor gene, which gene works either directly or indirectly to suppress the initiation or progress of a cancerous condition. Such genes may work indirectly where their expression alters the activity of some other gene or gene expression product that is itself directly involved in initiating or facilitating the progress of a cancerous condition. For example, a gene that encodes a polypeptide, either wild or mutant in type, which polypeptide acts to suppress of tumor suppressor gene, or its expression product, will thereby act indirectly to promote tumor growth.

[0096] In accordance with the foregoing, the process of the present invention includes cancer modulating agents that are themselves either polypeptides, or small chemical entities, that affect the cancerous process, including initiation, suppression or facilitation of tumor growth, either in vivo or ex vivo. Said cancer modulating agent may have the effect of increasing gene expression or said cancer modulating agent may have the effect of decreasing gene expression as such terms have been described herein.

[0097] In keeping with the disclosure herein, the present invention also relates to a process for treating cancer comprising contacting a cancerous cell with an agent having activity against an expression product encoded by a gene sequence selected from the group consisting of SEQ ID NO: 1-2276. More specifically, the present invention relates to a process for treating cancer comprising contacting a cancerous cell with an agent having activity against an expression product encoded by a gene sequence selected from the group consisting of SEQ ID NO: 1-92, 544-809, 1189-1850. Such a process includes an embodiment wherein the cancerous cell is contacted in vivo. The agent may include an antibody that reacts with a polypeptide encoded by such gene.

[0098] Some or all of the genes within these signature gene sets represent individual targets for therapeutic intervention, based at least in part on their pattern(s) of expression. For example, genes within the signature gene sets that encode cell surface molecules and are up-regulated in cancer as compared to normal cells. The proteins encoded by such genes, due to their elevated expression in cancer cells, represent highly useful therapeutic targets for “targeted therapies” utilizing such affinity structures as, for example, antibodies coupled to some cytotoxic agent. In such methodology, it is advantageous that nothing need be known about the endogenous ligands or binding partners for such cell surface molecules. Rather, an antibody or equivalent molecule that can specifically recognize the cell surface molecule (which could include an artificial peptide, a surrogate ligand, and the like) that is coupled to some agent that can induce cell death or a block in cell cycling offers therapeutic promise against these proteins. Thus, such approaches include the use of so-called suicide “bullets” against intracellular proteins.

[0099] The process of the present invention includes embodiments of the above-recited process wherein said cancer cell is contacted in vivo as well as ex vivo, preferably wherein said agent comprises a portion, or is part of an overall molecular structure, having affinity for said expression product. In one such embodiment, said portion having affinity for said expression product is an antibody, especially where said expression product is a polypeptide or oligopeptide or comprises an oligopeptide portion, or comprises a polypeptide.

[0100] Such an agent can therefore be a single molecular structure, comprising both affinity portion and anti-cancer activity portions, wherein said portions are derived from separate molecules, or molecular structures, possessing such activity when separated and wherein such agent has been formed by combining said portions into one larger molecular structure, such as where said portions are combined into the form of an adduct. Said anti-cancer and affinity portions may be joined covalently, such as in the form of a single polypeptide, or polypeptide-like, structure or may be joined non-covalently, such as by hydrophobic or electrostatic interactions, such structures having been formed by means well known in the chemical arts. Alternatively, the anti-cancer and affinity portions may be formed from separate domains of a single molecule that exhibits, as part of the same chemical structure, more than one activity wherein one of the activities is against cancer cells, or tumor formation or growth, and the other activity is affinity for an expression product produced by expression of genes related to the cancerous process or condition.

[0101] In one embodiment of the present invention, a chemical agent, such as a protein or other polypeptide, is joined to an agent, such as an antibody, having affinity for an expression product of a cancerous cell, such as a polypeptide or protein encoded by a gene related to the cancerous process, especially a gene sequence corresponding to one selected from the group consisting of the sequences of SEQ ID NO: 1-2276. In a specific embodiment, said expression product is a cell surface receptor, such as a protein or glycoprotein or lipoprotein, present on the surface of a cancer cell, such as where it is part of the plasma membrane of said cancer cell, and acts as a therapeutic target for the affinity portion of said anticancer agent and where, after binding of the affinity portion of such agent to the expression product, the anti-cancer portion of said agent acts against said expression product so as to neutralize its effects in initiating, facilitating or promoting tumor formation and/or growth. In a separate embodiment of the present invention, binding of the agent to said expression product may, without more, have the effect of deterring cancer promotion, facilitation or growth, especially where the presence of said expression product is related, either intimately or only in an ancillary manner, to the development and growth of a tumor. Thus, where the presence of said expression product is essential to tumor initiation and/or growth, binding of said agent to said expression product will have the effect of negating said tumor promoting activity. In one such embodiment, said agent is an apoptosis-inducing agent that induces cell suicide, thereby killing the cancer cell and halting tumor growth.

[0102] In alternative embodiments of the foregoing, the present invention relates to a process for treating a cancerous condition in an animal afflicted therewith comprising administering to said animal a therapeutically effective amount of an agent first identified as having anti-neoplastic activity using an assay process as disclosed herein according to the present invention, such as a cancer-related gene modulator as identified according to the processes of the invention. Such processes also include the ability to protect against development of a cancerous state by using agents identified by the assay processes of the invention. The present invention specifically contemplates a process for protecting an animal against cancer comprising administering to an animal at risk of developing cancer a therapeutically effective amount of an agent first identified as having anti-neoplastic activity using one or more of the assay processes disclosed herein for identifying such agents.

[0103] The processes of the present invention take advantage of the correlation of changes in mRNA expression profiles of these signature gene sets with potential (depending on the form of cancer) changes in DNA copy number of the chromosomal regions wherein these genes are located. Of course, the precise nature of the change in mRNA expression (e.g. a signature set of genes that are up-regulated at the transcriptional level) may also indicate a change in the DNA copy number for the genomic regions in which these genes are located (e.g. an amplification of the genomic DNA region that contains the involved gene or genes).

[0104] Many cancers contain chromosomal rearrangements, which typically represent translocations, amplifications, or deletions of specific regions of genomic DNA. A recurrent chromosomal rearrangement that is associated with a specific stage and type of cancer always affects a gene (or possibly genes) that play a direct and critical role in the initiation or progression of the disease. Many of the known oncogenes or tumor suppressor genes that play direct roles in cancer have either been initially identified based upon their positional cloning from a recurrent chromosomal rearrangement or have been demonstrated to fall within a rearrangement subsequent to their cloning by other methods. In all cases, such genes display amplification at both the level of DNA copy number and at the level of transcriptional expression at the mRNA level.

[0105] At least some of the genes that are contained within signature gene sets disclosed herein (SEQ ID NO: 1-92, 544-809, 1189-1850) display changes in their mRNA expression profiles (depending on the precise reading frame involved) within cancer samples due, in part, to changes in their DNA copy number as a result of specific chromosomal rearrangements in those cancer cells. The utilities that follow from this are (i) that the genes contained within these signature gene sets offer a time saving shortcut to the identification of novel chromosomal rearrangements, amplifications, or deletions that are associated with cancer, and/or (ii) represent key genes affected by such chromosomal rearrangements, amplifications, or deletions and, therefore, play a key role in the initiation or progression of the disease. Genes within the signature sets that identify changes in the DNA copy number (based upon their changes in expression at the mRNA level) afford an entry point into other forms of diagnostic assay for the initiation, staging, or progression of cancer to be conducted in tissue samples at the DNA level (e.g. if gene X identifies a novel chromosomal amplification associated with cancer, then that specific chromosomal region defined by gene X would serve as the basis for a diagnostic assay for cancer, where genomic DNA is extracted from tissue samples and evaluated for the presence of the specific amplification), and also the rapid positional cloning of genes that play vital and direct roles in the initiation or progression of cancer.

[0106] In one embodiment of the present invention, said change in expression may be determined by determining a change in gene copy number, wherein said change in copy number is an increase in copy number or wherein said change in copy number is a decrease in copy number.

[0107] Such change in gene copy number may be determined by determining a change in expression of messenger RNA encoded by a particular gene sequence, especially where said sequence is one selected from the group consisting of the sequences of SEQ ID NO: 1-2276, especially SEQ ID NO: 1-92, 544-809, 1189-1850. Also in accordance with the present invention, said gene may be a cancer initiating gene, a cancer facilitating gene, or a cancer suppressing gene. In carrying out the methods of the present invention, a cancer facilitating gene is a gene that, while not directly initiating or suppressing tumor formation or growth, said gene acts, such as through the actions of its expression product, to direct, enhance, or otherwise facilitate the progress of the cancerous condition, including where such gene acts against genes, or gene expression products, that would otherwise have the effect of decreasing tumor formation and/or growth.

[0108] The present invention also relates to a process for treating cancer comprising inserting into a cancerous cell a gene construct comprising an anti-cancer gene operably linked to a promoter or enhancer element such that expression of said anti-cancer gene causes suppression of said cancer and wherein said promoter or enhancer element is a promoter or enhancer element modulating a gene sequence selected from the group consisting of the sequences of SEQ ID NO: 1-92, 544-809,1189-1850.

[0109] The signature sets or signature gene sets disclosed herein are useful in identifying genetic regulatory elements within the promoters of the genes contained within the signature sets that are specific to normal tissue and/or the corresponding cancer. Each signature set is a collection of genes that share a gross common pattern of transcriptional regulation in cancer vs. normal (e.g. a signature set of genes that are transcriptionally up-regulated in cancer).

[0110] In one such embodiment, analyzing and comparing the DNA sequences of the promoter regions of all the genes contained within the signature set serves to identify conserved stretches or motifs of sequences within subsets of genes that represent cis-acting elements that specifically drive a form of gene expression (e.g. increased transcriptional expression in cancer). The identification of such cis-acting regulatory elements is then available for use in driving the cancer-specific expression of suicide genes or toxins via genetic therapy using technology already well known in the art.

[0111] In separate embodiments, said anti-cancer gene is a cancer suppressor gene or encodes a polypeptide having anticancer activity, especially where said polypeptide has apoptotic activity.

[0112] In additional embodiments, such insertion of said gene construct into a cancerous cell is accomplished in vivo, for example using a viral or plasmid vector. Such methods can also be applied to in vitro uses. The methods of the present invention are readily applicable to different forms of gene therapy, either where cells are genetically modified ex vivo and then administered to a host or where the gene modification is conducted in vivo using any of a number of suitable methods involving vectors especially suitable to such therapies, such as the use of special viral vectors, including adeno-associated viruses and adenoviruses, as well as retroviruses and specially constructed plasmids to accomplish such therapies. The use of these and other vectors is well known to those skilled in the art and need not be described further.

[0113] The present method also relates to a process for determining functionally related genes comprising contacting one or more gene sequences selected from the group consisting of the sequences of SEQ ID NO: 1-2276 with an agent that modulates expression of more than one gene in such group and thereby determining a subset of genes of said group.

[0114] In accordance with the present invention, said functionally related genes are genes modulating the same metabolic pathway or said genes are genes encoding functionally related polypeptides. In one such embodiment, said genes are genes whose expression is modulated by the same transcriptional activator or enhancer sequence, especially where said transcriptional activator or enhancer increases, or otherwise modulates, the activity of a gene sequence selected from the group consisting of SEQ ID NO: 1-2276.

[0115] In one such embodiment, small molecule screens serve to identify changes in expression of genes within a signature set and thereby provide a tool for the identification of specific functional pathways and a means of assigning defined functions to novel genes.

[0116] In situations where a signature set of genes that are transcriptionally up-regulated in cancer cells compared to normal cells, such screens facilitate the identification of small molecules that down-regulate the expression of the genes of the signature set within cancer cells. While such therapeutics make a cancer cell “look” more normal, based upon the expression of the genes within the signature set, what actually happens when such screens are put into practice is that all genes within the signature sets do not respond identically to each small molecule within a chemical compound library. If an average signature set contains 200 different genes, for example, and the expression of all 200 genes is monitored in response to a library of some 50,000 chemical compounds, and subsets of genes within the signature set consistently change their patterns of expression in response to particular chemicals (e.g., 10 of the genes always change expression in a coordinated way, such as down-regulation of one gene within the group of 10) then it always causes the down-regulation of the other 9 specific genes as well.

[0117] Such subsets or subgroups of genes within each signature set that change their expression in a coordinated way in response to chemical compounds represent genes that are located within a common metabolic, signaling, physiological, or functional pathway so that by analyzing and identifying such subsets one can (a) assign known genes and novel genes to specific pathways and (b) identify specific functions and functional roles for novel genes that are grouped into pathways with genes for which their functions are already characterized or described. For example, one might identify a subgroup of 10 genes within a signature set (5 known genes and 5 novel genes) that change expression in a coordinated fashion and for which the 5 known genes are involved in apoptosis thereby implicating the other 5 novel genes as playing a role in apoptotic cellular processes. Therefore, the processes disclosed according to the present invention at once provide a novel means of assigning function to genes, i.e. a novel method of functional genomics, and a means for identifying chemical compounds that have potential therapeutic effects on specific cellular pathways. Such chemical compounds may have therapeutic relevance to a variety of diseases outside of cancer as well, in cases where such diseases are known or are demonstrated to involve the specific cellular pathway that is affected.

[0118] It should be cautioned that, in carrying out the procedures of the present invention as disclosed herein, any reference to particular buffers, media, reagents, cells, culture conditions and the like are not intended to be limiting, but are to be read so as to include all related materials that one of ordinary skill in the art would recognize as being of interest or value in the particular context in which that discussion is presented. For example, it is often possible to substitute one buffer system or culture medium for another and still achieve similar, if not identical, results. Those of skill in the art will have sufficient knowledge of such systems and methodologies so as to be able, without undue experimentation, to make substitutions that will optimally serve their purposes in using the methods and procedures disclosed herein.

[0119] The present invention will now be further described by way of the following non-limiting example but it should be kept clearly in mind that other and different embodiments of the methods disclosed according to the present invention will no doubt suggest themselves to those of skill in the relevant art.

### EXAMPLE

[0120] SW480 cells are grown to a density of 105 cells/cm² in Leibovitz's L-15 medium supplemented with 2 mM L-glutamine (90%) and 10% fetal bovine serum. The cells are collected after treatment with 0.25% trypsin, 0.02% EDTA at 37° C. for 2 to 5 minutes. The trypsinized cells are then diluted with 30 ml growth medium and plated at a density of 50,000 cells per well in a 96 well plate (200 μl/well). The following day, cells are treated with either compound buffer alone, or compound buffer containing a chemical agent to be tested, for 24 hours. The media is then removed, the cells lysed and the RNA recovered using the RNAeasy reagents and protocol obtained from Qiagen. RNA is quantitated and 10 ng of sample in 1 μl are added to 24 μl of Taqman reaction mix containing 1× PCR buffer, RNAsin, reverse transcriptase, nucleoside triphosphates, amplitaq gold, tween 20, glycerol, bovine serum albumin (BSA) and specific PCR primers and probes for a reference gene (18S RNA) and a test gene (Gene X). Reverse transcription is then carried out at 48° C. for 30 minutes. The sample is then applied to a Perkin Elmer 7700 sequence detector and heat denatured for 10 minutes at 95° C. Amplification is performed through 40 cycles using 15 seconds annealing at 60° C. followed by a 60 second extension at 72° C. and 30 second denaturation at 95° C. Data files are then captured and the data analyzed with the appropriate baseline windows and thresholds.

[0121] The quantitative difference between the target and reference genes is then calculated and a relative expression value determined for all of the samples used. This procedure is then repeated for each of the target genes in a given signature, or characteristic, set and the relative expression ratios for each pair of genes is determined (i.e., a ratio of expression is determined for each target gene versus each of the other genes for which expression is measured, where each gene's absolute expression is determined relative to the reference gene for each compound, or chemical agent, to be screened). The samples are then scored and ranked according to the degree of alteration of the expression profile in the treated samples relative to the control. The overall expression of the set of genes relative to the controls, as modulated by one chemical agent relative to another, is also ascertained. Chemical agents having the most effect on a given gene, or set of genes, are considered the most anti-neoplastic.

[0122] In carrying out the methods of the invention, it is to be expected that not all cells of a given sample of suspected cancerous cells will express all, or even most, of these genes but that a substantial expression thereof in a substantial number of such cells is sufficient to warrant a determination of a cancerous, or potentially cancerous, condition. The sequences disclosed herein are represented by SEQ ID NO: 1 to 2276 although different genes are more or less relevant to different organs and tissues and some may be up-regulated in cancer and not normal cells while others are up-regulated in normal cells but not cancerous cells. The sequences presented herein may be genomic or cDNA sequences and may also be represented as RNA sequences. The sequences of the sequence listing herein are mostly cDNA sequences but can be used to locate genomic sequences.

The application's sequence listing, which the Patent Office published only in electronic form, follows.

SEQUENCE LISTING (2276 sequences)

SEQ ID NO: 1 - DNA, 118 bp, Homo sapiens
gaaaggtacatatattcgtttatgtctaaaataacaaccagaatcttctttatatatagtatttttaaaagacacatatacacaaacacaaacatgtgcagtaaactcaaacacacaa

SEQ ID NO: 2 - DNA, 427 bp, Homo sapiens
  misc_feature: n=a,t,g or c
atctaacaaaggcactttattgcattaccattcacaattaacagtcaagaacaaataataataacaaataaaataacttttaagaggacaaggcattagaaataaaaaaggacactaataacatttgtaaaagcttgtactggatgtggttgcccccatttgtgtgtgtggttgtgtgtgtgtggttgtgtgttggtggccacagctgagcctctgtcaccagagaaggctgaggcccaatggcacacctcagaaacctacaccccgaggctnggacggctggactcctgagcacaagctccctctcgcaccctttgccagacagtttgtctccaatttcaaactgacctaaggctcttactcctggattttttgtttttaaaccttctcccagccagtcttcgggagggcatgattagagaagngg

SEQ ID NO: 3 - DNA, 412 bp, Homo sapiens
  misc_feature: n=a,t,g or c
tttnnttttttttttttttgtgtgtttttttcttttaatgccaagcacaaagtgtacatcataaaattcatatttggngtttggcattattttantaggtatgatcaagaccacaaatatcttgccataaaaatattctactataataatgaaaaaatatatcattacatcatcagtgactcgaataaaatatggtatagatatggcattttcaatgaaagttggaagacacaccacatttgtactagtcttaatataggcacagtaagaagaacagatatttcccnctttggctagtgatatgcntttagggtagttacgctgctgattatcccagtgaagttagtgttgaggaaattctctttacttgngccaaatctgcacttatgggcaagactgtggtacaagcncc

SEQ ID NO: 4 - DNA, 462 bp, Homo sapiens
  misc_feature: n=a,t,g or c
tgacagaccaggcttggcagtttatttcggtttcacaacccccttccagcccttggggtcccttgagcagcacatctgggtgccctggccttcagcgggnagngngtcctggggtcccagcgcangangngggagttcccctttaggagtctcactttcggctgggcatttctgggcttcctggggggcagatctggccgtgggggcaatggaggagccnaaaggggcacctgcccaggctccaactccctgccttcctggtcactgctgttccctgagtcctcagcagtagcctgaccgtagaactggtagatactcacggcctcccagcccttgatctcgcagcggcagaaggggcaggtctgggctgtccgagtgctgccaggcanccaggcagcagctgcagaanaggtgcccgcacggctcaatcttcacatccttgttgctctcagcacagatctt

SEQ ID NO: 5 - DNA, 261 bp, Homo sapiens
gagggaaagacaaaacgtatttattccaggccaggtcttaaaatgcacactgcacggttccctgttgttatcagcaccagtaaggaaagaacgtgccttaacggcagccccacccagagcctgctgcgtggctgctgtgaggctccccatgaatccacgcagtcttcttcctcactggtgcagttggtgaggttttctaccctcacagcaaagggatccttaactataaattcacggtatgcagagaagaggacagaatct

SEQ ID NO: 6 - DNA, 562 bp, Homo sapiens
  misc_feature: n=a,t,g or c
tagatttctcatagatttatttctgcgtcatattatatatagatatatgcatatataccttttagcnaaaggagancaatctatatacccttcccttccccaccaaactcacaaaaggagattaaacccttccaggattgccatcaagcttcccgagatggccagggcaangaaagaatcatctctcaacatgttaagaaacggctgccattcttaggctctggggttgaagcagcagcattcccaggacccaagggccagagagaggaaaagaaatgactgtagtgtgacaggattctaggatgaacatgtccagtgactcctgggcatggcagactagctcccagaattctcagggtgtgagtaaaggtgggggccctatggctcttcagaggctgctcaataggtcaggggtagggtataggaactggggatcaggcatgcagggatggggtggcagaaaaaacgcctgtggggttatgctccagacagagcgacccccatcanggctacccactactcaatgacatgtaatgnacagggacagatgctgagctcctta

SEQ ID NO: 7 - DNA, 429 bp, Homo sapiens
tggagataaaaacagcgaagtcccacataccataccctacaagacacaaggtgcgcagacgagccttggtaatgtaccggcgctgcaggaagaggctgtccgccgagcctgggctgctccagctacgcggggaggcggccccattgcaaagtgcagtttctccgcggaggtggcggtgggtcagtggcagagggccatggtttccatgttaaggaagcggacgtgcatcttggtctcaatgtcgatcccctgccagatcttcaggaagtcctcgaaggtgatcccctcgtacacctgatcaggctccatcttgccccatgcacacgctggccgcctccatcatggccccgtcggcgatggagcgagcggactccttctcgatgtgagggtttcccgacagcagctcctcgaccactttacatttcgagg

SEQ ID NO: 8 - DNA, 348 bp, Homo sapiens
  misc_feature: n=a,t,g or c
acataatccctagtatagtcagatatatttatcacatagagcaactaggttnaaatatagttcagtgacatttctagagaaactttttctactcccataggctcttcaaagcatggaacttttatacaacagaaatgttgacagaaattgctgtagtttagggttgaagtactgtatgatgggcagcaatcatgtattaacttacgaaggggaaattgaaatatagggaccgaatttggttttatcagtttccagagtactgctgccaacctagacactgatttttcagagtttgaaatgtaaatttcttcccgggactttgattgcacatgaagctggactgcgtta

SEQ ID NO: 9 - DNA, 652 bp, Homo sapiens
  misc_feature: n=a,t,g or c
tgactttgctgatggtttattaccttaaggaaaagacttacacagagaaattgagcaatgaaaacccttcacattgagcaaacacattccacgctacacaaatcatgagaaaaatgagaactgttgtgaaacatgacagattgcccaagtgttatttttcctctattggaaaattctaagacgtttcctcatgtgtagtttttcagtcacaaaaatggcagtaggaatatttaaatattaaatcacagtttgaaaatagatacatacatacatatatatacacacacagagatacatagttgacttatgattcccagatatgcagggttatcattgtgactgcttggatcaagacaagtttgtaaaaagcagcgacatagttcaacataatagtcaggagctagattacttccctgtaattgctatgcacacacagtacaaggctagcgagattatagacaatctgtcttcgaatctactatcttgataattctgaatcttttcaagttaaaattgcagctattgtcagtaagcgcccctataaaggtcaggcctttgantgggggacgataactngcgtcaccaggagagaggcncggttcaacttccnggttccgtctggcngcggtcacagccggnaacctgggtcccg

SEQ ID NO: 10 - DNA, 614 bp, Homo sapiens
  misc_feature: n=a,t,g or c
nggctgtgataggtttattcagaggaagcactagactctggggtagctcacatgggtaagaaagacttccaggagcaggcattgaagggttggcaccctgggtgagtgtccaaggtcagcgagagtcacttgtggaggggacggaagatgacctggctgatctggccagggatggtgtagaagaccaggaggaggaagacggtgagcagcaccagtagcagcagcaccagggtngcccagtaccggcncagatgaagaagacaaaggccttcagcgggttcacaaaccagttgaaggaagttttggggcggctgggtttctccagaaggctcttggctgcttccgccccttccccattggccgtttctcgggcttccttccacagtcaagcaagctcaaactcttgcctccaacnttgcccgtgaagaatgtacacattggcanccatgtctgtgaactcccangtctttttggccggccttcctcctcctctgctttcgcttcttcttgcaagcctgagcctcctgngcttccggtcaagtccttgctccttaagttnaataacggcaacagccctcaaggggggaagaaacagattgactcngccggcccat

SEQ ID NO: 11 - DNA, 187 bp, Homo sapiens
tttttgagacatgaaaacgtatgcatttttattaaccagatttttaaaaaaggacaaaggcacatgtatcagggtgccgggggtgcatggtgtacatctgatttcataagcaatgtcagtctcctctaaactggcatcctgcgcttgacaggtaggcagaacaaacgggacgctggcaccggaacct

SEQ ID NO: 12 - DNA, 349 bp, Homo sapiens
tttctcggtcaataatttattagtaaaatatacatttctcattattaaagaataaaagctttcagccctgctgaacacacatctgaggtctcaagaaaaccagacaagatagctgactctcccacatagccctttccataaaggcgattcctaagcttaaacacacacaaagctggggctgtccctcttgaatcccatgggaaacaggccccaagatcaggggacctggagtcgggagcttggggtgcagtctgctcactgacaccctctcgaagagcacgcaggggaacctggtcctgggatggagtctttctggggatgcccacgtctgtgctgcctggaaccgggt

SEQ ID NO: 13 - DNA, 476 bp, Homo sapiens
tcacatttgtatgtgtcatttatttcggttgcgctggggaaagagaacgcagtttctctccccgcctcctcctcgctgggtagaactaactctaaaacaccaatatctcaacactgaaccctcccaaatcgcaagagttttcttttccccttccttgtttttctttttaagctgattggcttttgtctatcttgctctttccttttctttttcgtctctcccccgcctgtgttggggtattttgtggggtttttgtttttcccctggctgtgctgaggcagcaggctgggtagggtttaggactgctccttgtcggttttctctttattcatctttttcatcttcatccttcgattctgaaaccagattttgacctgccgctcggtgagattgagaacccgggccacctcataccgacggtccctggttaaatacatattgaagagaaactccttctccagttccagcgtcaggta

SEQ ID NO: 14 - DNA, 388 bp, Homo sapiens
tgggggtaggctctttattagacggttattgctgtactacagggtcagagtgcagtgtaagcagtgtcagaggcccgcgttcagcccaagaatgtgggatttctctccctattgatcacagtgggtgggtttcttcagaaaagccccagaggcagggaccagtgagctccaaggttagaagttggactggaaggcttcagtcacatgctgctttcaagctttcaggctgggcaacaaggaggagatgcccatgacgtgccagggtctccccatctgacaccagtgaagtctggtaagacagcagccgcacgcctgcctctgccaggagggcaatcatggtaggcagcattgcagggtcagaggtctgagtccggaataggagcaaggg

SEQ ID NO: 15 - DNA, 461 bp, Homo sapiens
tgcggccgcctccatgaagcggaaaagcgagccgcggtcgagctgggccgccgccccccctgctcgcgggctgctcgtcgacctcgccgggtgtgaagaagatccgcagctccacgcagcaagacccgcgccgccggaccccccaggacgacgtgtacctggacatcaccgatcgcctttgttttgccattctctacagcagaccaaagagtgcatcaaatgtacattatttcagcatagataatgaacttgaatatgagaacttctacgcagattttggaccactcaatctggcaatggtttacagatattgttgcaagatcaataagaaattaaagtccattacaatgttaaggaagaaaattgttcattttactggctctgatcagagaaaacaagcaaatgctgccttccttgttggatgctacatggttatatatttggggagaaccccgaagaag

SEQ ID NO: 16 - DNA, 339 bp, Homo sapiens
aaggagggatgtctgtttatttacagtgcaccctttgtgccaggcccttatgttcatgaccttacccaactctacaatcttgcaaggcggtttacatcatctccactttacagttcaagaaacaaaggctcagattcatagcccctgaatagtccctcatagtccctgagttcataagtagtggttatagtacaatctaagctatttaattccaaagccagtgatttttctggccttgagctataggtccaaaggctccaacagggccctccagactcaatggcagggtggtgtctgcacaagctggaagtgtccttgtgatgagcccatcaggagcgg

SEQ ID NO: 17 - DNA, 402 bp, Homo sapiens
ggcaagaaaaaagagtaatgtacaaaagtcattacattttgtaatatactcattacaaaaagagtaatgcacatgagtacattactgttgtattaaaaattatattagaagaaatgtctctttttgtgaacaacttcacaaaaccagaaaattataaagccacattaaaattaggtgaaatcacatcagccagccagacacaccattgacatttttctatattttctgacaggtttttgaaaatgcatatatactttaaaaacacagttgggtcaggtgcagtggctcacgcctgtaattccagcacgtgggaaactgaggcagaaagattgcttgagcttaggaatttgagacaggcctgagcaatatagcgaggctctgtctctaaactaataataatcc

SEQ ID NO: 18 - DNA, 399 bp, Homo sapiens
tttttttttttttacctcttcaggatttattgggtcagggaagggcctggccagagaatctgtcctgaggtgtccctggtactgcactcctgagtttctccctgagttgtctgccgctccttgttcagccataccaccatggggtgactctgtcaagcacctgggggtcctgggtgcccagcttgccaagtgatcttgggcctattccttgccctccctgagcctcagtctctcatcctccatgggaggatggtaattttcctgaaaaagacagggccgggccacccagggtccacttccactcagcatcttggattccagggaagcagacagcgttcaggtcctgcccttctgtgactccctgcagccactgcttcttgaagcctttgtctctaagct

SEQ ID NO: 19 - DNA, 478 bp, Homo sapiens
cttgaattattgcatcaaggactttccccctacttcgattcattgctaatgagctctttgcttcttcaactttttgaaagagatcatgaaccaaacttttaaagtttgtttcttcttgtgtaagtttttgaagttctttttctttctcctttaattcttgttcagtttgagggagttttccttctatatctctgattgcagctttcctttctttgagagtctcagaagctgcaattagagcttccttagccttagttaattgagacactgcagtattatgacgactgagatagatatcaagttctgactgggctacatccatctttgaacgtgcttcatttaccgatttgctgaaacccataagttctttctctcgactctgttaaaatatgagttcattaaatctggacagatatttactttcaaacctacactgaaatgaaaccatacattttatattcgatttaagaaaggagat

SEQ ID NO: 20 - DNA, 330 bp, Homo sapiens
gggtgtggaaacatgtgagtgtattatttatttttgaataaataatacaataaaatataaaacatacacttattgtggccctctgcacaagcaatctggttgtgcagagtcttggtgtcccctgctagtcttagtacctgtatagagctcttcagactgggtgtcgtgttgcagaggctagcaccattcctgatgtcaccctgggtgagacgtggtcctcagaatccagatttccttttttgtctttttccttcttccacatgttctaagaaaacatagatttctggccaggcatggtggctcacgcctgtaatcccagtactttgggag

SEQ ID NO: 21 - DNA, 183 bp, Homo sapiens
aaaaactaaaccgcctggggctgatcgtcccagagcccggcagttaggaccatgcgggaagtgtcctggggcatatagtcatactgatgaggtgaaagatacacctcggaaccaagggccaccctctacttttaaggacaatggcgccgggaccaagaaactacacttcccagaaaaccgtgc

SEQ ID NO: 22 - DNA, 142 bp, Homo sapiens
caaacctggcgtctataccaacatctgccgctacctggactggatcaagaagatcataggcagcaagggctgattctaggataagcactagatctcccttaataaactcacaactctctgaaaaaaaaaaaaaaaaaaaacc

SEQ ID NO: 23 - DNA, 371 bp, Homo sapiens
ttttttttttcagtgttttaaacaaatgtagactttattttgtactgtacaaagtgctaatgtcagtagatccattaaaatatagaatatttaagaaagatcattaataaaagtaatggtcattcaatttaatgttacagtttacagcgttttactgctagtgttttaagtcagcatgagcagtatcaaagtacttatgtagctagtttctaaaactttacagaaaacccagtacaattccaagtgcttatagccaatataagcatatttcatattagaaatagttatccatatgttaacaagaaactatggtcctcaaatatgccaattttagagtctaataactactgatagtaactatgtaaatattt

SEQ ID NO: 24 - DNA, 427 bp, Homo sapiens
attagcaaaattactttattctaacaaatagtttaacacaaaaatacgaactagccctccagggatctttggggtctacgcttcccatcgcctcagtgtccggtgcatgaggaaggtgtcctctgaagggcggggccggagttgaagtcggagagggggcagaccgtccagggtcaggtgtggagattcataaaatagcgtttctgggtcacacaagatggtcatgtctggcccaggcccaggtggctcctgttgggaggttgggcccaaagcaaggttacactttgggaggaaggatccgggtaagggggtacatggaggaagccccacgcccagaccccatcacctttgggtgcggggctcgagcatgtgcggcaaggagagccaatttctccctgagcgcggcattcagaacctgttcctccgg

SEQ ID NO: 25 - DNA, 335 bp, Homo sapiens
tttgtaacagaaaaaaatatatatatttcaaaggtaactagttttgttttactcaaactatttacaacaaggggcagagtagagacatgaatagctgcacaagttattttaattataaattaataaaagcctacattaaattcatcttattaactacttatgagagtgtataaaaactgatgaagccaacattatttggtacttctgatacttccattcgcttcaacttttctttcttaatagaaaaattaacagatggcaagccatttacaaaaagacatgtaattttgttaatcaggttgacattttgaacatcttcctcttcagttcagctg

SEQ ID NO: 26 - DNA, 425 bp, Homo sapiens
tttttaaatacatgccaaagcgtttatttaactcattaattaatgagggaattggtagatattacaatgaattcaaaagcaaattgggagtgtcacacatttttagtcaaatatggaatgctgaaatgaatttacaaaaggatacaaaggtggtcactatctgctggaaaaaaaatcagtttcattccattagatccaatttgcatttccatggataataattatttgtattcctatcagttttctataacttcatttctatcgtatggggttgtaaaataacctagtcaaagatacggagagagctgggcacagtgatgtcctcctgtagccccagctactcaggaggctaaagcaggaaaactgcttgagcccaggagttcaagaccagcccaggcaaaagagcaagactgccatcttaaaag

SEQ ID NO: 27 - DNA, 255 bp, Homo sapiens
ttttttcttaagacacatttattatctcacagtttctgtagaccaggagtctacgcacagtttatctgttttctttgctcagggtctcacaaaactgctatcaaggtttaagtcaggctgtcttctcatctggaggccacctctcaggttgttggcagaattcatttccttgtggttgtgtgactgagggccctggcttcttactggttgtcagctgcaggctgcgctcaagttctagaagccgtctgcagttcc

SEQ ID NO: 28 - DNA, 446 bp, Homo sapiens
ggcagacacttccatttaatgactaaaaatcacacatctcaggtcacgggtctaggagaaaacacacacacacacacacacacacacacacacacacacggattccccatcaaggggacatttgcagtttccaaaccttgaagatactgaagggaccagaaagttcctttgagtggctggtcacccaaagctcccggtcctccacccactgccctttggagggactcaaaccttgggaggagaaggctgagcttcctgtgggcccctcccacccacacctgagccagagagaagactgcagcaaagacatccaaagccaacgcaatgggaagcgtccgagatggcagaggagccagccctgtccttggctcacccagcttccaccatacaggaacccaagaccccagccttgcttccacagagaactggcaggggtcccctggcct

SEQ ID NO: 29 - DNA, 448 bp, Homo sapiens
ttttttagcacttgaacttctgactttattatttttcttcaaatgaacaggtgataaaacactgtgtccaaagcaaaatgcatgactcccttttctcttctttcacagagtaccagaaaatgtaaacaatatttagcttgaacttctgagtcctcatcttttttttaacagcctttagaacaacattaatttgtttgtttatactagcattttacaacataaaaaataaaataagcagactgtctgaggggtttatataaggttttcagattctgatacaggcttgcatctgcatcgtttttagtctgacaaagagaaacactgctttaggaagtgggtcatgtgggtgtataagtggttcgtggacaggccggataagccgtggttctggtcagagtaccacattgcctggaaatccacttgtgcattaaccagagctttagcaatc

SEQ ID NO: 30 - DNA, 403 bp, Homo sapiens
ttttggaaggataatctttttattttcttaaaaccactttgggagtgcatttgtattcaagaggcaatagagaacctcaacaaggctggggagttgggataggcaggaatctggaaggcaggataactcttgagaacctggagagcgtctgtggtttacggtcagtctcaaggcgatggatgggagtcctggtgtgtttagatttggcatgtttctcgccttctagggaggtgccgttaagtcagtgcccagagcccaatcccatggcacctgctcaggaccatgaatgaagaccttgctctggggcatccaggtctgtgtgaaggagcaacaggagcctgtgggcaggcagatgtcttgggaggggagatgtttggagccaagtctagagaagcttctcact

SEQ ID NO: 31 - DNA, 297 bp, Homo sapiens
tttttatattctccctttattaaataagaggtagcatactctattaactattctacaccttgtttttttcacttaacaatatatcctaaagatcattttatgaaagtatacaaatttcctacccctgttggagctgcttagtattccacggggtgaatgcactgtagtaggttcaaccactcctgagttggtggacatctgagtcgtttccagtctttaactattataggcaatgcttcggtgaacatgtcttttcatgtttgtgccattgtatctttagttttgtatcagttagct

SEQ ID NO: 32 - DNA, 448 bp, Homo sapiens
ttttttttttttctgggttttcacaagtagcatttttattcctcctgctgtctgacatctgagctccaagctctaaacccaacctgtattatatgcagcagcaggttatctttgttttaaatcacatttgttattctgtacttagtcacctttccgtgtgatctgcatttgaaatgttgtaaacttggtcagtatttccattaaaatatcagggctaatcttgtgtatttttttttgttcctaatgattttatagacaaagactcttggcaaccccaggagaaaaaaaataaagctgtcagtggagtactagggatgagaatgaaactggaggtctgtttctggtattatggcttcccgggactctacagtcctgtatggtgaaatacatttttccattgggatcgtcaatgccatgactgttctgccacctcaaactccagagtttc

SEQ ID NO: 33 - DNA, 436 bp, Homo sapiens
ttttgggaagagtgattaagaaactttattacagaaaatgaatgcatccaacgtccccaaatacatttgtgacaagaacagacacacacaggagacacagacaatagtcactacatcacagccttgttctttccgaagataaaatgtcattcaagaatggggtgaggtggttagagggagtaggtactatccttttaaatgggggaaaaaaaaaaaaaagcaacaggttggcatcttaagaacacagacagtgggcccagaaatcaagctaagcctaagccttaggtaacatcatgccacttacatcatctcagagaaactagggcattattccactagaagagcaatcttgccacagtgtgaaaacgttgagtagtgatcttgctgccccagctaatggaccaagtggcctcaacttgacagcctctttaaaact

SEQ ID NO: 34 - DNA, 303 bp, Homo sapiens
tttcaatttcttcaacaggtcatgttcaatttcttcaaagttttaacataaaaataatgagagccaggagtggggccggggctggggggacgaaggtggtatgtgaacaaggttggcacacaggcctcaccctcctctgcctcagattcccaagtgggcaggtgggggtgaatggggctccgggtagcacctcagctcctctcagctcccctcagcctgttctccttccagacccagagagctgagaagagtagctgtgaggctcagggcagaggctctctgcctttcaggaacagccctaac

SEQ ID NO: 35 - DNA, 297 bp, Homo sapiens
gcactttttggaggaagtttattaaattaaaaaaaaaaactacaaatgagtaattataaaatataatttcactcttttcattatttaccacaaaaatttaaaaataccaatatacagacgagcacaagtgaactggaaaagagctaaaaattgtataaaagacaaatctaaactcaagaatatatgagaagtgacatacaccatacactctcaagtgagttcagaaagcatgttccgtgctgggcaggttttctttccaggtcagtttttattggcactacacctggaaagctctct

SEQ ID NO: 36 - DNA, 401 bp, Homo sapiens
cttttttggccttctgctttgaccaagctttattttttatgaattttcttctcccttcattttctgttttctctcttctttgttgctccaggagtttctgcctctgcttttctctgattttatctttaaatggaatcgtgtcggtattaacgtccacgggcacaaaatctggaaactgctttcctctcaattctggcatcttgggcatcctcagcagggcaaaacctcgagcaaggctggcaaaatcaagatcctttaatctgaaaatcaggttgcattcatgctttgcataagcttggacatatgacacaaaagctttcatgcccttttcaaacacagctctgtcagccagggccatggacttgagttttggcagaaggtccgctgtgtttctctggggc

SEQ ID NO: 37 - DNA, 379 bp, Homo sapiens
ttttaacaggcagaaactctttaatcaggctttttttccaactctaaaacaaaatcccattttttccttaaatttagttcctcaggaacagagaactttgcaatgatgatctcaactctgcatcatctggtgactcctgattctgcaggactaagacatttcccaagagttctgctgcatcagccagtgaggacaagagttcttcagtgcggttcagctcaaggacacctaggcttccccagcaggggcttgcttgcaggtctgacaaaccacagagcgttgagcagatggcctgggactcccagacctggcagagggttttattagggcccgcctgggctgcaccgtttcatccaagtaccctgacccagcactcatc

SEQ ID NO: 38 - DNA, 413 bp, Homo sapiens
  misc_feature: n=a,t,g or c
aataaaacacatttgtttcatatttgctgaaaagtaaaacaataatattgtacgaaatgttatacacagggtaggttgtacatagcagtttcagaaacatcattgcatccaccagagaaactattctaaaactgatattcacacattttttataataataataatatgttagaaacatacagtgtggcatttagtatatacactcccttgctcgcaagcgaaaaatcctaatcgcttctgtataacatgctttattttaaagcctaacctttaaaaacactgttgtgatattactaacaactgcttttataaaattaatttgacatttcgatatatatacatcctttcagtcatttaaaatgttaacaatgctaaacttaaaaaataacaagcttatagntaatggttaaaat

SEQ ID NO: 39 - DNA, 447 bp, Homo sapiens
ttgagacagagtctcactctgtcgcccaggctggagtacagtggcgcgatctcggctcactgcaagctctgcctcccgggttcatgccattctcctgcctcagcctcctgagtagctgggaccacaggcacctgccaccatgcccggctaatttttttgtgtgtatttttagtagagatggggtttcaccgtgttagccaggatggtctcggtcgggatagagacggggtttcaccatgttagccaggacggtctcaatctcctgacctcgtgatccacccaccttggcctcccaaagtgctgggatttcaggtgtgagccaccgtgctcggccaaggacatcttcctaatgtacttgatgtgagacagagaaatgggaagtcctagagacttataaatctgcaaccacaaaattaagaaaggaccctgaagttacctgggtcacgc

SEQ ID NO: 40 - DNA, 1253 bp, Homo sapiens
cggccgggagagtagcagtgccttggaccccagctctcctccccctttctctctaaggatggcccagaaggagaactcctacccctggccctacggccgacagacggctccatctggcctgagcaccctgccccagcgagtcctccggaaagagcctgtcaccccatctgcacttgtcctcatgagccgctccaatgtccagcccacagctgcccctggccagaaggtgatggagaatagcagtgggacacccgacatcttaacgcggcacttcacaattgatgactttgagattgggcgtcctctgggcaaaggcaagtttggaaacgtgtacttggctcgggagaagaaaagccatttcatcgtggcgctcaaggtcctcttcaagtcccagatagagaaggagggcgtggagcatcagctgcgcagagagatcgaaatccaggcccacttgcaccatcccaacatcctgcgtctctacaactatttttatgaccggagaaggatctacttgattctagagtatgccccccgcgggatgctctacaaggagctgcacaagacctgcacatttgacgagcagcgaacagccacggtccggcggatcatggaggagttggcagatgctctaatgtactgccatgggaagaaggtgattcacagagacataaagccagaaaatctgctcttagggctcaagggagagctgaagattgctgacttcggctggtctgtgcatgcgccctccctgaggaggaagacaatgtgtggcaccctggactacctgcccccagagatgattgaggggcgcatgcacaatgagaaggtggatctgtggtgcattggagtgctttgctatgagctgctggtggggaacccaccctttgagagtgcatcacacaacgagacctatcgccgcatcgtcaaggtggacctaaagttccccgcttctgtgcccacgggagcccaggacctcatctccaaactgctcaggcataacccctcggaacggctgcccctggcccaggtctcagcccacccttgggtccgggccaactctcggagggtgctgcctccctctgcccttcaatctgtcgcctgatggtccctgtcattcactcgggtgcgtgtgtttgtatgtctgtgtatgtataggggaaagaagggatccctaactgttcccttatctgttttctacctcctcctttgtttaataaaggctgaagctttttgtaaaaaaaaaaaaaaaaata

SEQ ID NO: 41 - DNA, 316 bp, Homo sapiens
  misc_feature: n=a,t,g or c
gatccgggggcatgcagaagctgagcacaccccagaagaagtgagggtccccgacccaggagaacggtggctcccacaggacaatcgntgcccccnaacctcgtagcaacagcaataccgggggaccctgcggccaggcctggtgccatgagcagggctcctcgtgcccctggcccaggggtctcttcccctgccccctcagtttccacttttggggttttttattgttattaaactgatgggactttttgtgtttttatattgactctgcggcgcgggccctttaataaagctaggatacgcctttggtgcagct

SEQ ID NO: 42 - DNA, 1215 bp, Homo sapiens
ctgggaagcagagtgtctggatggaacctgagctgggtctctgactcacttctgactttagttttttcaagggggaacatggcaaaggtgttcagtttcatccttgttaccaccgctctgataatgggcagggaaatttcggcgctcgaggactgtgcccaggagcagatgcggctcagagcccaggtgcgcctgcttgagacccgggtcaaacagcaacaggtcaagatcaagcagcttttgcaggagaatgaagtccagttccttgataaaggagatgaggatactgtcgttgatcttggaagcaagaggcagtatgcagattgttcagagattttcaatgatgggtataagctcagtggattttacaaaatcaaacctctccagagcccagcagaattttctgtttattgtgacatgtccgatggaggaggatggactgtaattcagagacgatctgatggcagtgaaaactttaacagaggatggaaagactatgaaaatggctttggaaattttgtccaaaaacatggtgaatattggctgggcaataaaaatcttcacttcttgaccactcaagaagactacactttaaaaatcgaccttgcagattttgaaaaaaatagccgttatgcacaatataagaatttcaaagttggagatgaaaagaatttctacgagttgaatattggggaatattctggaacagctggagattcccttgcggggaattttcatcctgaggtgcagtggtgggctagtcaccaaagaatgaaattcagcacgtgggacagagatcatgacaactatgaagggaactgcgcagaagaagatcagtctggctggtggtttaacaggtgtcactctgcaaacctgaatggtgtatactacagcggcccctacacggctaaaacagacaatgggattgtctggtacacctggcatgggtggtggtattctctgaaatctgtggttatgaaaattaggccaaatgattttattccaaatgtaatttaattgctgctgttgggcttcgtttctgcaattcagctttgtttaaagtgatttgaaaaatactcattctgaacatatccatgcgcaatcatgataactgttgtgagtagtgcttttcattcttctcacttgcctttgttacttaatgtgctttcagtacagcagatatgcaatattcaccaaataaatgtagactgtgtt

SEQ ID NO: 43 - DNA, 3236 bp, Homo sapiens
gacccggccatgcgcggcctcgggctctggctgctgggcgcgatgatgctgcctgcgattgcccccagccggccctgggccctcatggagcagtatgaggtcgtgttgccgcggcgtctgccaggcccccgagtccgccgagctctgccctcccacttgggcctgcacccagagagggtgagctacgtccttggggccacagggcacaacttcaccctccacctgcggaagaacagggacctgctgggttccggctacacagagacctatacggctgccaatggctccgaggtgacggagcagcctcgcgggcaggaccactgcttataccagggccacgtagaggggtacccggactcagccgccagcctcagcacctgtgccggcctcaggggtttcttccaggtggggtcagacctgcacctgatcgagcccctggatgaaggtggcgagggcggacggcacgccgtgtaccaggctgagcacctgctgcagacggccgggacctgcggggtcagcgacgacagcctgggcagcctcctgggaccccggacggcagccgtcttcaggcctcggcccggggactctctgccatcccgagagacccgctacgtggagctgtatgtggtcgtggacaatgcagagttccagatgctggggagcgaagcagccgtgcgtcatcgggtgctggaggtggtgaatcacgtggacaagctatatcagaaactcaacttccgtgtggtcctggtgggcctggagatttggaatagtcaggacaggttccacgtcagccccgaccccagtgtcacactggagaacctcctgacctggcaggcacggcaacggacacggcggcacctgcatgacaacgtacagctcatcacgggtgtcgacttcaccgggactactgtggggtttgccagggtgtccgccatgtgctcccacagctcaggggctgtgaaccaggaccacagcaagaaccccgtgggcgtggcctgcaccatggcccatgagatgggccacaacctgggcatggaccatgatgagaacgtccagggctgccgctgccaggaacgcttcgaggccggccgctgcatcatggcaggcagcattggctccagtttccccaggatgttcagtgactgcagccaggcctacctggagagctttttggagcggccgcagtcggtgtgcctcgccaacgcccctgacctcagccacctggtgggcggccccgtgtgtgggaacctgtttgtggagcgtggggagcagtgcgactgcggcccccccgaggactgccggaaccgctgctgcaactctaccacctgccagctggctgagggggcccagtgtgcgcacggtacctgctgccaggagtgcaaggtgaagccggctggtgagctgtgccgtcccaagaaggacatgtgtgacctcgaggagttctgtgacggccggcaccctgagtgcccggaagacgccttccaggagaacggcacgccctgctccgggggctactgctacaacggggcctgtcccacactggcccagcagtgccaggccttctgggggccaggtgggcaggctgccgaggagtcctgcttctcctatgacatcctaccaggctgcaaggccagccggtacagggctgacatgtgtggcgttctgcagtgcaagggtgggcagcagcccctggggcgtgccatctgcatcgtggatgtgtgccacgcgctcaccacagaggatggcactgcgtatgaaccagtgcccgagggcacccggtgtggaccagagaaggtttgctggaaaggacgttgccaggacttacacgtttacagatccagcaactgctctgcccagtgccacaaccatggggtgtgcaaccacaagcaggagtgccactgccacgcgggctgggccccgccccactgcgcgaagctgctgactgaggtgcacgcagcgtccgggagcctccccgtcctcgtggtggtggttctggtgctcctggcagttgtgctggtcaccctggcaggcatcatcgtctaccgcaaagcccggagccgcatcctgagcaggaacgtggctcccaagaccacaatggggcgctccaaccccctgttccaccaggctgccagccgcgtgccggccaagggcggggctccagccccatccaggggcccccaagagctggtccccaccacccacccgggccagcccgcccgacacccggcctcctcggtggctctgaagaggccgccccctgctcctccggtcactgtgtccagcccacccttcccagttcctgtctacacccggcaggcaccaaagcaggtcatcaagccaacgttcgcacccccagtgcccccagtcaaacccggggctggtgcggccaaccctggtccagctgagggtgctgttggcccaaaggttgccctgaagccccccatccagaggaagcaaggagccggagctcccacagcaccctaggggggcacctgcgcctgtgtggaaatttggagaagttgcggcagagaagccatgcgttccagccttccacggtccagctagtgccgctcagccctagaccctgactttgcaggctcagctgctgttctaacctcagtaatgcatctacctgagaggctcctgctgtccacgccctcagccaattccttctccccgccttggccacgtgtagccccagctgtctgcaggcaccaggctgggatgagctgtgtgcttgcgggtgcgtgtgtgtgtacgtgtctccaggtggccgctggtctcccgctgtgttcaggaggccacatatacagcccctcccagccacacctgcccctgctctggggcctgctgagccggctgccctgggcacccggttccaggcagcacagacgtggggcatccccagaaagactccatcccaggaccaggttcccctccgtgctcttcgagagggtgtcagtgagcagactgcaccccaagctcccgactccaggtcccctgatcttgggcctgtttcccatgggattcaagagggacagccccagctttgtgtgtgtttaagcttaggaatgccctttatggaaagggctatgtgggagagtcagctatcttgtctggttttcttgagacctcagatgtgtgttcagcagggctgaaagcttttattctttaataatgagaaatgtatattttactaataaattattgaccgagttctgtagattcttgttaga

SEQ ID NO: 44 - DNA, 40392 bp, Homo sapiens
gatcctcccagctcagcctcccaagtagctgcgaatactggcgtgcaccaccatgcccagctaatttttgttttttctggagagactgggtctccttatgttacctaggcttgtctcgaactcctggactcaagcaatcctccagcctcagcctcccaaagtgttgagattacaggggtgagccgctgcacctggcctaaaaaaaaattttttttaatacaacaacctaagtatgtataattgacatccatggaatgtaaaaggtatgggtgggtagaaaagaatatttgaataaataatagtcaaatgtgctccacatttggtaaaaaccaaaaactggtatatccaagaagttcaacaaaactgaagcacaggaatcatgaagcaaatgactccaaatgacataatagtcaaattagtaaaatctggtgatgaagagccacttaaaagtatgattctaagagtacatttctcattagaagcaatgtaagcaagaagacagtggagcaataattttaaaatactgaaagaaaacagctgtcaaccttaaattctttatccaacaataataactttcaaaagtggaggataaatataatgttttcagacatataaaaacttacagaattgattactatcactcttgtcattagaaatgacaaaagacacccctagacagggggaaaatcataccaaattgaaatatgaattcacacaaatatcagataatgcaactccatttgaatatataatcacatttgaagacagattttaataagtgatatatgtatcacaaagcctaaagtaaacattaaacttttttataaaagaattatgactagtaagctgtattaggattctccacagaaacaacataaatcagatatgcatgtatgttatacgtgtgtgtatatatatacatatgtgtatagtatatatatgtgtgtatatatatacatgtgtatagtatacatatgtgtgtatatatacatgtgtatagtatacatatgtgtgtatatatacatatgtgtatagtatatatatgtgtgtatatatacatatgtgtatagtatatatatgtgtgtatatatacatatgtgtatagtatatatatgtgtgtatatatacatatgtgtatagtatatatatgtgtgtatatggtgagagaaaaagaacaagagagaaactaattttgaggaattggatcatatatttgtggtagctgacaaggatgaaatatgttggtcaggctgaaggctggaaattcaagtaagagttgatgttgcagtcctgcatccaaatttagcaaggcagcacttcaggaaacctccacatttgttctaaaaacattcagctcactaaagagtcccacccacattgtgaagagaaatctgcttatacaaagtttactaattaaaatgttcatcacatctgaaagttatcttcatgtcaactcctatactggtatttgataaaatcaatctggtgcatagcctacccaatctaacacttaaaattaactatcacttaacccagcaaggaaataaaaagataatttaaaaaatcaatcaaaaaaggagacagcaaaagggaaagaaaactaacgaacatatgggacaaatataaaataaagagcaagaagatccttccagctcagcctactgagtttctgggactacaggaaggtttgtagttctccttgaagaggtccttcacatcccttgtaagttagattcctaggtattttattctctttgaagcagttgtgaatgagagttcactcatgatttggctctttgtctgtctgttgttggtgtataagaatgcttgtgatttttgtacattgatgttgtatcctgagattttgctgaagttgcttatcagcttaaggagattttgggctgagacaatggggttttctagatatacaatcatgttgtctgcaaacagggacaatttgacttcctctttttctaactgaataccctttatttctttctcctgcctgattgccctggccagaacttccaacactatattgaataggagtggtgagagagggcatccctgtcttgtgtcagttttcaaagggaatgcttccagtttttgcccattcagtatgatattggctgtgggtttgtcgtagatagctcttattattttgagatacgtcccatcaatacctaatttattgagagtttttagcatgaagtgttgttgaattttgtcaaaggccttttctgcatctattgcgataatcatgtggtttttgtctttggttctgtttatatgctggccacttctcaaaagaagacatttatgcagccaaaaaacacatgaaaaaatgctcaccatcactggccatcagagaaatgcaaatcaaagccacaatgagataccatctcacaccagttagaatggcgatcattaaaaagtcaggaaacaacaggtgctggacaggatgtggagaaataggaacacttttacactgttggtgggactgtaaactagttcaaccattgtggaagtcagtgtggcgattcctcagggatctagaactaaaaataccatttgacccagccatcccattactgggtatatacccaaacgactataaatcatgctgctgtaaagacacatgcacatgtatgtttattgtggcattattcacaatagcaaagacttggaaccaacccaaatgtccaacaatgatagactggattaagaaaatgtggcacatatacaccatggaatactatgcagccataaaaaatgatgagttcatgtcctttgtagggacatggatgaaattggaaatcatcattctcagtaaactatcgcaagaacaaaaaaccaaacaccgcatattctcactcataggtgggaattgaacaatgagaacacatggacacaggaaggggaacatcacactctggggactgttgtggggtggggggaggggcgagggatagcattgggagatatatctaatgctagatgacgagttagtgggtgcagcgcaccagcatggcacatgtatacatatgtaactaacctgcacattgtgcacatgtaccctaaaacttaaagtataataataataaattaaaaaaaaaaaagaaaagaaaatgtctctagacagcttggttcctgagctgggaatcaaccgtcttttctctccctttcaacccagagtgtggcaggcgcgccccctacaggcagctaaaagagctgactgagatgccgtctccatagggagggatttgggctgagaatttgggctgaggattttcccatgccctccctggcaggctggtcccaggacactcagaagacttactgttacaggtccagagcatttctcgtcttccttttctctctccttgccaagtgaccttggaattgttcctccccatctcagccccttcccttttgtgttaagtgcagtttgcagattttgtgttcctaggtcctgtatctgtagaattttagggaaagcagtgctggtcacccacatggaattcaagacagcgagcccaggaccagaaacacagacagcagtgggggtccccacagagcagcatggtgggcaccaggtggaggtaagaaaccaggaaccactcccctgagtgtcttcagccccaggtgaactagggaggggtcagtgggctgggctcaacccaccggggactctcctgtcactgccccagcagcaccatcctggaagcccctatatgtgctaagcagctgccaaagaacttgattaattacctgtaaatttcccttcaccacacctgaccacacatgactcctgcccccaaattactaatttattaaaatggcacaattagccgaaatggcctgaatccaggacccctttcaggtttgccgctgacctctcaggtcctcacacatgccagactctttccacaggggcctgactccactgtttccaacacaaatcccaggactcatttttctctgtcagtcctgacagcagttccagagacacttccccattaagatgtccccaggctcttataatacaacctgtctgttattttctgcctaaatctttttaattatccccatagcatttacaactgtaggaatctttgcctattgttaattttattaattgattggtgttaaatatttacttaattggtcatggatgcttttttaccacagaatcacacataaaaaacagacacaaacagctaagggtgtatttctcgctgcaataatacccaccactttcacgaagacaccagggtctttctcactttttgtcccaccatccctatgatattggctttattttcatccctgctgatgtgtgacctcagggtggctgctgcagctccagctatcactcccatattcaaggagaaaagggcctcatgaatctagtgctctttcacaagagcaaagctttcctaagaagaatttcacccactgatctcacaccccactgatcaggcctgagtcacatggtcaatcccagctgagcaggacctgggaatcacaggcaccagtcttttcggtgaatatagaagacagtgctcaggtggaaggtgacagggactgtctgctgggtctgcaaacccagttttcccgcacagccaaaccagcacgatgaacaactcacttcaagaaggctgtgtcttgttcctgctgaattcaccgcatggaacgtgtcccagaccacagtgggtctggattaacatttgatgggtggatgttcttctgtctctgactttggtgcaggagtcaccactgtacgctggtcctgcatccacagcggggaccagtaagagccagtccctgagtcctgtgatccccgccctgcatgccaagccctggtattacccccatgaccacccaccgcccagacacatgtgcaggcagcctcagatggaccttcctcctcctcttccaaatattcatgttcatattgtcatgagtaatctgcacccctcgcacctggtattgaggcaggcatgagtcacaaagagaagagaaaaatttcctccattggcaccagcagtctgcagaccagggaatcagggacctgaacagaagattttaattatacacccggacccaggaggcccttgagcctccagcagccagtatggagcagccaccaggggacagaacagagtcacctggcaaagtcacttggagatagggtagacctgggtgacaaggagatgctgacatgcagggagggtcagtgaccacaacctgagatctagaaaggtgtcgtttttctacagcatcatccttaacatcgagtacaaattctccaggctttgtgtttctcagctttgtctctggccaatgttgcatatttgacacaggtgcagacactttgcttccccctacacactggcccactcttctgtgctaaaacgctgtcattgccacaaacgccatcctcccctgtgggcacatgtgtttcatcaccctcctgtttgctctgagagccccctcattctgctacacagcaaagttttctttcagcatctaagctgtacctgaccatgaccacatactgggggtacataggcacagcacctgtgccctaccctaggagctcacagccaaggccaggaacttacagcatctcctgagtctttcaacactccgtgtgcacatgacaagggtgaagtttgattgtggaaagcaccactcagaagcaatggcaggtccctgcatgtgtgccagccttacggtgtcacctgtagagtggggtcatgagggtcactgcactgggttgaaaagtgccctccagagggggagctagaaccacacctaacttctggattttgccacaaaatatttagggacaggacacccctggagtcctcaattacccaagttattctgagccagtattcaacagaggaagtaccttagatctcagaataatccctcagtcgccattgtaagtcagtccctggccatctccacgcaggacaaggaatggccacatgggcaggacatcatactacctggaaaacgcacaaagaattcctctcagagttctgcatggccagatcagctcaggagtgaggccataacacaacctacagtgacgatgtcaacccagatgatgggaccagaaggagaatgagaattctgtgtgctgagggtgggtctttaggggccccctctctctctgtcccttggggctgagcccttctctggaaaccacacagctcctcctgcagcagcccctgactgctgatttgcatcacgggccgctctttccagcaaggggataagagaggcctggaagaacctgcccagcctgggcctcaggaagcagcatcggaggtgcctcagccatggcatggatccctctcttcctcggcgtccttgcttactgcacaggtgctgcccctagggtcctagccactggtccagtcccagggctctgggtccagcctggccctgactctgagctcagcagggcccccgcctgtggtgggcaggatgctcatgaccctgctgcaggtggatgggctcggcggggctgaaatccccccacacagtgctcatgtgctcacactgccttagggctctttcatccctggatctgtgtccaggccaggcacgtgggaagatttacttggagttcagctcctcagtttcaagccttttctctcccgttttctctcctgtaggatccgtggcctcctatgagctgactcagccaccctcagtgtccgtgtccccaggacagacagccagcatcacctgctctggagataaattgggggataaatatgcttgctggtatcagcagaagccaggccagtcccctgtgctggtcatctatcaagatagcaagcggccctcagggatccctgagcgattctctggctccaactctgggaacacagccactctgaccatcagcgggacccaggctatggatgaggctgactattactgtcaggcgtgggacagcagcactgcacacagtgacacaggcagatgcggaagtgagacagaaaccagccacctcggcctggctcacaagacccttccctctctcctgccctgtcacactgagcaggagggagccttccatgtggaatggaagtttccagtcctatccctgcccttatgttcctgagagacgggagcaagttcctgcccacctctaggctcagcttatcccagaataaactgagctagtcattttgatgatcaaatgccagctcccaaaagaccccagaaaccctgatatctaagtagcaccgactctattagtatcaagggagactagccctagggtggaatcattttagtgtctcagaaggcacagggcaatggaaagtgtttatgaggtttcaggatatgcacgtgagcagttaaaggcaggtcttacaaggaaggaacctactagaattggggcccatctgtgacatcatagcacagcctggtggacacagagaagggaaggtcctgaatcaagtcttgatcagtaaatatttattggataagtgagcaatttacataggtgagaactgtgtgctctcttgagcagaacacttacctggataattggttttcaggaattccctgaagcaatgagtgacattctttattgttttcaccctcatccacctgggaaagagtatcctggaaccagcagttaacattgacacagctggtctcggtcctcagcacaaacattcattgcaggctgaaaagtgacaacggaagagaaaggagtttattaaatccctagacacaaacaaatccataagcagagatgagagatgcgggctcagctggcccagtcccacaggggtcattcctcttgtgatggaaatgaccacatgagggtcccccaagcggtgttggggggcagtcatggggaactggcctcccagggctacctgctgcttgggctgggcagaggttagagggatggaagtctggtccagtccttcccagcagcatctccaggctcctcctccctctactggggcttcccctccactccccagaaccatcattgcttcctcatctcctgtctcctccctgccccaaggccctccctgtgctcaccctggctcctccccctgctccatgcccagcctctgcagagcagcccaggcccagagacttgggcagaagcttccgtcccaccagctgcagaaccttccctacagaaccaggccagtccctgtgtctcatatttgtagagatcccaatcaccctcagagatgacgggtgggaaaccagcccacagtgacctaggctgttgggcatatggccttcaagctggccttcaagcccacttggctgcatctccttggccaactccaacatccaggctgggagtctggaatcctagttcccctggcccattcactcccactagggttgcttctaaactccctgggcctcagcttcctagtctgcccactggaagcagcgacaggcattttccagggctgcggtaagggccctggaacaccctctctcaccctctctctccctttctctctctctctctctctctctctctctccccctccccctccccctccctctccctctctctctctgcctctgtttcctcctcagtagtgggaagaccccctgtcaggtgggccagtccatgacatctacagagggagcaggaacctctcctatttcctggaggagagctggggtggaggctgcaacccaggatcatcagaggagctggggtcttcaaggttcctagggaccccttaagcgggggtcagagtggcttcagcggtcttattgctcggtccagacagaagatgtttccagttgtgaaaaacgacttcagggacaacaaaaacagagattcgcctctccagacaccagtggttggtgtgcctggagtactcctcgtaccaggcaggggagagagtcctagacagaggaggttctaagtgtcacctagatttcaggcctcggggcctgtattgggtaggtgatgtcacagtgagttgatgctctgtagccccttccctaggaggtggcagagggaagagctggtggtcctctgaggtgtgagtgagtccaaccctgagggtcttcccaagctggaggtccctgggtgtagacggaagaggttctggtcaaagaggcctggtgttgaatcctggtccatttattcatttggtcaagaaatattcatggaggacccaatatgtgccaggtgccaagccaggtgactggggacacagtgttgagtgggacagttggctccttcactgctagaggtattatattctcaagccgagactcggctctacgattgtatgtcagatatatagcctctatgtgcatgtctccagagactggtttcctggagttccaagtgacagccatcactcacctcgaatgcaaaaattaaaggagcatccaaaaacctagtgacccagataaataatacttaatgcaatattttcaaaaatcaaaattaatgcccaacaaacccacaatgaacaaaatttcaggatctgactcactcacctcagtggttttgttcttggtcctacccacagtcccacaggtgagtgagtacccacagggatgcaaaaccagagtcaggcccctgcaccgccttctgcccggccaccagagccctcccctgggtcttggcctttctcttctgaagagctccagccagttcctcctcaggcttcctctactgctggtctcttctgccccctactggattctccccttacagctgcactccaggcagctggtggaggttaaagaacagaaacctcccaaaactccaccctccagttccaggctggctccacctcatgtccaaaaaggctggtcctccaggtctttgattgctattagtaagtcccaagacacagtctttacaccaagtcgctgtgtgccttgggcaagaaactctccctctctgagactgtgtttccacactggtagaagtagctagaagacctccctgccaggttggcaagtccactctgtgacatctacaaagggagcagggatctcttccatttcctggaggagagctggggtggaggctgcaacccaggatcaccagaggagctggggtctttggggttcctgaggactcctcagagggggatcaggagctgcagagccagcttctaactctggggactcagagatccagaacctttgtcatatccccagccaatactttgtcatcctgtgcctcagactcccccagatcccaagagtgagaagctcaagacgagacaagaaagaccagccagcttgaatttagggatggtggggagtggggagctggggacccctggacctgggggagaggagtctgcagtgcctgcaggtggagtttctgggacctgggggatggagactgggcaggggactgaccagcagaaggccaaggtgggggataccctcagacatggagcagggcagaagcaactggatggggtacatccctctgctttgggagagaagggccagggcgggacccagagagctctgcagaggcaccacagaccctcagcagggggtctgccaaacaggacagctggacttggctgcttctgcccaggcctggatccagcccttgcacatctcagggcaggggataggcctgggtggccagagctgcagctgcacctgctggggaggcctagtccagtcctccagggtccccagacagactcggatttccgactgcagccaccatggaaggatgtggtctgcggtgacgatgtctatccagaggccatggcaggtgcaagggtgggggtaggggcagcagctggggatgctacatttagggacagcccctttttatccccaagacctgggactgtccctgaaaggaaccacagcttctgggtcctgagcagtgggtgagtgtcatacccacagaggggctggaagggagcagcttcagcctagactcccagggcagaccctgccccagccccgaatatccaaggagcccaagatcagaggcaggaataggccaagctccccagtggagaagctgtgctggaccaggggtttcccagggccctcccttgtgccctgaatgatgtctgttagggcacctacaccctgttactgctcagtgccttgcctattttgaaggacagggatgtgtggtgattatttgtataatccagcccccagcacctggtcctcaaaagttacccaagcaatgtgtataaagatccagcctggagatctttgaaaaccgattcgatgagtcgaaccattaagtcatgatcaccatcctcaacttcatctctttcttcctcctcctcctcattatcatcaccttcaagaactgttaagagtctgagacttcatcctatttgcagactaaaaagtaagcctgccacagtgccatggatgctggcagaagatacaagactcctgggtcagagacaacgaataatctgtttttcacagcaatagcagttgccaaggtatcagcattgtcttgcaccagttccacaaggtgatgcaaagagggccaggtgacatctgcatgccagagctcagggatcccaaatatttcatacttgacagtaagcatatatctgtgttttgctccaaagagaggcattctctgtaccttccgaggttgttcactccacaaacactcttgaaaagataatccacaatcagtgcctttgcccgagagacatgcagaaatgcagagatccatagtagaccactgtctcccaacaaccatcaactttatcaatgaaatgaagtctcaggctatttgtctgttaccatagcccacaaaaatgtctggcttgattgtcaccaaatgtatcaaggaagttaaggagtatctgacacaaaatgtgaaccaagcaattctcaaaggagcctcccaggaaattcactttaggaagtcctaggaggctcctctgagagttgctaaaacaaaacattgagagtcctagagggctgcagatctgaacttgagcagatatttttaaagattttgtggcagaaaaagaaactggaaagcaagagggcagaccctcattgcagttctgtaatgtaagggggcagagcaggggcctttctcaccagagtatggggtcctgaagatctcctcaaacatttttatactaggctctcagggcaacagaaaagatgggagcgatgaatggggcgtaaaggagtgcaaatgacacaaggggtcacatgaagcaaaagaggtttattcaaccagatttagtccatgtttaattgagccactcctttgtgccaagctctgggttttcccatgcaccaagcagtgtgttaccacctagacccagagagccatgtcatcatcagcaaagcacgccctagtgtcatgcaaggaccaggcctcagattccgactccagacctactgcctcttggccctgtgacattaaaagagtagggaatcagcctgagcagcatttcctcatcttcaaatgtggaggacagtagatgatcttagctcccaggattagtgcttgtaaagcaataataatgtaatgcattattattgtattatgcatcatattcccatattatagtcaaaaaggaccccaacttaaagcacctgccagccctctcctcctccaccactgccgaatggagccaggcacgagtattccaggtggacagacgaatagaaatacaggggacgagccccttcctagatcctagcgcagcttgctccctacttaaggaatgatattggaccctgcattcatcttctctggatggtaattttctcacctgtaaaacagagacactggccccaaggacaccccacaagtagttgtgaatcccaaagtaagagaagaacaaaaaaagaaccagaatttattcaacacccactgagtgcttagcaaacacatggtttctttaactctcataagcttcatgctgcagaggaactctccccattttacagataaggaaactgaggcccagaggtaacctaggtctagatagactccacatttatgacttcaccactcttccttgcctgaaggatatagaatcactccctgcagggctcttgcctgactcaggaaagggccacaggatagccagccaggcttaaccaacccagccaagaaagggctggtcccaactggctggagtgcagtgtacaggcacccagcctggaagactgatcagaaaagaagccacagctccagccccagccccaaccccctgagctcaagcccttggggactcctgctgggcagctctctaggccctagggagatgctccacagacccaggctgccctttgggaagtggggaagacaagtgggtcaggtgtgcaccacccaggggcggggccaggcagccggctgtggtgggaggcagttgagccctggattgtgaccgcttcagggcagttggtagatgcccctctgggagagatccccaggggtgacagccatggaccctggaagggcctgggctagggacagggaccagagccagtccagggagaggacagagccaatggactggggtgtactgtaacagccctgctggcgagagggaccagggcaccgtcctccagggagcccatgctgcaagtcgggccagaggtgcccctgaacctgaaggccaatgagacccaagacaggccaagtgggttgtgagacccctgaggagctgggccctggtcccaggcagcgctggcccctgctgctgctgggtctggccatggtcgcccatggcctgctgcgcccaatggttgcaccgcaaagcggggacccagaccctggagcctcagttggaagcagccgatccagcctgcggagcctgtggggcaggtaaggggcaagagattccaggggatgtgggggtcctgcagcagagctgggaaagggtgaccaaggggagacaagccagaggagtgaggaggaaggttaacccctaagaggggcctgggctgacactggctttagtaatgggttgatattttgtccatcacagatttgtttgaattactgtttttaatatcatattacgatattatttttcttgatttctgagttttctggcgccacttaaattttcaccagggtcagtgcctcaatcacctagtcctagtcctctgggtagggaaggaacagaggcagggacaggacatccacagggggtggtggccactgtccccacagggtgcccaggcctgttcctccccctcctcctctctgcccatgtgcctcctgcccagtgagggcaggggccactccctggagaaggcagcaagggcttggtttggtctcccccaaggctgtctgttcaccaacttgcacataaatgcttactggggccaggctcaaggacacagggagggtgggatgaaccgaggggagctgtccagtcattggaacaggcccacggcccatgtttggagcaataaagggagaggggatctccctctgggatgatgcccaggctggtctcacagatcgaggggcactggctggtgatgggtgcccccaaaagacagagcagcgtcagaggagaggagagcacaggatgaggctgggagctcctgggtgactgggaaggggaggcaagaagaccatagggtccgtgcaccattcccagtccaggacgagtccttggatggatttaggtagattgattatcagagtcagatttgtgtttttggaaaaatcagcaccggattggaggctgatgcgacgcccgattagaggagggaggagagggggtgatggccaagtccagggtaggtggggatcctggaggaagccgtgccttggggatggggaggacactcagattcagagcacccaggggcccagtttcctatgaaatgggagcatgaagttgaagtgagggctgagcagaggggagcagacacgctcggggactgtctatgggcattaaaaatgtataaccattttagcaacaggcggcgagtcaaaaaacaaagtgtgtttatctaaactgggcaattccacttctaggaatttatcctaagggttggttgggggaataatcaaagctgtaaccaaatctttataacaagggtggttagctcagcattattagtgatgggagaaaactggaaaaaatccaaatatctaccagaaagggtgtgaaaaaacacaattgtatttgggggactgttgttgtttttgttttgaaacagtcttgatctgttgctcaggctggagtacagtggcgtggccacagctcactgcagcctcaacctccagggctcaaaagatcctccagcctcagcctcctgagtagctaggactacagatgcaggccactacacctggctaattttgattaggattattattagtttagagacagagcctcgctatattgctcaggcctgtctcaaattcctaagctcaagcaatctttctgcctcagtttcccacgtgctggaattacaggcgtgagccactgcacctgacccaactgtgtttttaaagtatatatgcattttcaaaaacctgtcagaaaatatagaaaaatgtcaatggtgtgtctggctggctgatgggatttcacctaattttaatgtggctttataattttctggttttgtgaagttgttcacaaaaagagacatttcttctaatataatttttaatacaacagtaatgtactcatgtgcattactctttttgtaatgagtatattacaaaatgtaatgacttttgtacattactcttttttcttgccaaaaaaaaaaaagattaagcagagaagtatataaagtaaaagcaagtgcttctgcttaccatctctcacctcttcccagagatagccactgtcaggttggtcaatatacttccagaacttttcctgtgtgtgtgtgtgtccctgaaaacacacacacacacacacacacacacacacacagttggtgctgggattttattttgcaaaagtaagagccatattctgcatattaccaacttttaatctattattgacactttctgtatcagtccatatggattaaccacattcattgcttataaactttgttttataagcaaagtttagatgagccagaatttatttccactaaaaaatctaaatgacaaatgatgctgcagtggaaatttgtgtgtgtgtgtgtgtgtgtgtgtgtgtgtgtgtgtgtgtgtgtgtatgtgtacaaagtgcacttatatatctccccaggatagatgcctaaaagtggaattgctggatcagagagaatgtacttttgaaatcttataggtagtgtttccaaaagtctgtgtccactcactccggtgaatggtagtgccttcgctcctacattcttaccaataatgcaaaattgttgatctttttatattctgcccatctgatgagcaaaaaattgaatgtgtttatggttttattgtgtattttattactggtgaaattattttttatatttttatttattggttttatttcgtctgtgaattaactggtcatcatgttgcccgcctttccattcagttgctttcatctttttatatatcaataacatattgggatatatttgggattttaaccacttgtttagtgtatgtattgtaaatatttttccctggtctgttttacgggtcttttgtttatggggtctcccaccataaaactgtggtaaatttttatgtgtcgaactggtttaatcttttctttatggtttctgtgacctccaccatgtgtaggaagttgtctttatttcaatattataaactcatttttctgttttattctggtacttttggtgtattggtgttttatttttttttctttacttcccctggagtttatttttgtggatgtaggaataagaccttattttccaaataggaaagccaatcatcacacatttgttgaatataaatgcaacttttctcaattactacattactgatttattacattctttctgtggttctcttggtttattgagctattcctgcgcccaccctgttttgattattttagctttatggtatgttcggtaactggtagggaaagaacccgtcattgttactttttctcaaaatagtcatgtctattatctgtcattcttagagttggactgcagaattggttctctaattttcaaaaatcattcttgtgttatgtggtaatatcacagaatatgggattaatttgagaactgctatctttataatgctcagtgtttttgttcagagacatgatgtactctccattcactcagataagtggtttaatattttattcatgcaaatcttgcacactttgttttttattcataaagggtttgtaaatataattttattgaagttataaattttttcacaattttatatcgtaaatgattactgtttctatagcaaggaaccctattaacttttctatgttgctcttgtatccagacactttaactcttgtattaattccagcagttcttcagctgattctccgtgtgtgtgtgtgtgtttgtgtgtttagttaactatcacaccatttgccaagaacaattttctctctttttctgtaatatttatacctccttctctcccccttttatgtcatttcattggctggaatctatacaatatgctgaataataaaagtgagactagacaaccttgccttgtttctgattctttaaatgttttgcctttaaatatgaaggttgctgtaaatttggggagatattcttcactgagttaagaaaattttcttcagtaacttaataaaaggctaaatgtttgctttctttatatgagaaacaagtgttgaatttatattactattatattaaattctgtttcaaaaatcttctgcacatgtcttaaatacaaatgtattaaatacaagctgctgctaagatgaaagttgctggccccatcacaatgggtatcttccaatgtgaataaattgccttggggaataaaatcagatttggaaaaacctgaggatggttgccatcataaactcttagagtgtgacctgggtgtttttctttttctctgtaggatgttaatagtatcttgtgtcatgctaggatgtctaggacagagggcaatacaatgaggggaaggcattctgcgatgtccccaggcctctggcttgaagagtaacttgctgaagtgaggactctgtggaggagcaagttatacagaaagaagtttagttgtgatctgttgagttggaggtgtctacagggcatccaagcagacataggttgaggaggcagaatatatgtgaatctggagccaagaagagaggtaagggctggaaatagggatctaagacccctggacagttgtgagtgtgcacaatgagggtcagatgcagagaaaattaggagactacagagagcagaacccagggtggggatctgggagtcagcagttgggcatgggcctggtagaaagggaagccaaggaggaggagagggggcagtctcagacaccaaggaggggagagtgactagaaagaaaaccttcttgcagagacataggggatggggaagaactgcagactgaactggggcaaaggactgttggccttaaccagagagatttgagggagagatgaggctgagagccaggggatcctgccatgtcccagcataaaaacagtacctgacacagatgggtgcttgggagctgttgtcggatgaatgagtggacagatgcatggatggacggatggatggaaggatgatagattgatggacaaacagatgaacagatgaatagctggatggacaactggatggatgggtagacagaatgatctcagagatcagaaaaagcttcatgcactaagtgggactgaaccgcgtctccatgggtagaaagcagaggaatctccacttgagtcaggaatgacccagtgctctcaatccagggagaaagccagcctggcttcactggggacacttgtgtgggggactcagaggccctttaaatgaggccagacgaggttggacaggtccaagccaactcagcactcctctgccacactgcacaggaggggatgtgtcactcagggagttgctgggacctatgggtcccagtgttgtcatcagcaccgacagcctcagagaggaaagacacacactggggtaactccaaggctgtgtgtggcacttgccttggacagcagacaggcacagggacacctctagggggctggccacccccctgcctcatgtctaggtcccagccccgcccactgcaaccctgtgcccgtcatgcccagcaggctcctgctccagcccagcccccagagagcagaccccaggtgctggccccgggggttttggtctgagcctcagtcactgtgttatgtcttcggaactgggaccaaggtcaccgtcctaggtaagtggctctcaacctttcccagcctgtctcaccctctgctgtccctggaaaatctgttttctctctctggggcttcctcccctctgtcctcccagccttaagcactgacccttacctttctccatggggcctggaggaggtgcattagtctccgggtaaccggcaggaagggcctccacagtgggagcagccggatgcagcctggtcccggggcctgagctgggattgggcagggtcagggctcctcctctcttccagggcagatgtctgagtgagggacagaggctggttctgatgaggggccctgcagtgtccttagggacattgcccagtgactcctggggtcaaggacagaggctgctggggtgggcctgggagctgctgagtctcatagtctaggggagcagccccaagaacagctgagggtctaggctgaggactggatgccaatccagcctgggagggccacacggcctggtgacacagaggtcaccccaaggggagaccaatggagggcacagagagggctctgggtctaggctgcagctctgtggcctgtgctgggtcatgaggacatggggacacagagggacgggtgagactgggtgaggtgccagaatccaaccctcccaggacagtcaccagaaaggagacagtctcttagggcagagatgtgtctgtccctggagccccgtcacctctggggcccagtgtctctctgttcacggatcggcctcctgccttcctcaaagggcatgttagactcaggaaatgaccagaggggagtgaatgaggggtgcagagaactccatggctaccaggtgaagtttggggtcatcacaggctgctggggtgggcctgggggctgctgagtctcatagtctgtgggagcagccccaggaacagctgaggtgaagggttctgtggtcgggcttgtggagacaggaaacatctcagagcctcagaggagccctgaggcttgtctaggtggagcccactccttgccaggagagccaagtgggctgggctggggcagagcccggtgcctgtgagggataggaagctccagttcaaagcaggcttgggtctccccacacactgcctgccaggacagtcctacaggatgagcaggggacccacagttcacggaggaggctctaggtcctggaagaataaagtgggtgatggaggggggtatagggatggaaatgagggatccaggggtcaaggccagattctaaactcagactccagagatcagagaagaaggaacacagcctgccctgggtatatggagaaattgaggctgtagaggagaggggctgggccaggacacctgtgaaaggtgacttgggagggctcctaggaaggcacagagctgtctgctctccacagggcatgagtggaaaggatggggaaagaagaggagagaaccccgggtggaccggatggccacactgtgaaccctcccagagactttagacagagagaggggctccacaacaccccggtattctgtctgccctctctcacccccttccctgtccacacaggtcagcccaaggccaaccccactgtcactctgttcccgccctcctctgaggagctccaagccaacaaggccacactagtgtgtctgatcagtgacttctacccgggagctgtgacagtggcctggaaggcagatggcagccccgtcaaggcgggagtggagaccaccaaaccctccaaacagagcaacaacaagtacgcggccagcagctacctgagcctgacgcccgagcagtggaagtcccacagaagctacagctgccaggtcacgcatgaagggagcaccgtggagaagacagtggcccctacagaatgttcataggttcccaactctaaccccacccacgggagcctggagctgcaggatcccaggggaggggtctctctccccatcccaagtcatccagcccttctccctgcactcatgaaaccccaataaatatcctcattgacaaccagaaatcttgttttatctcattttttttctcacataaattgctagcctccccggggttctcagtgtggggtacagggaattctgcacccagtgtgaaaatcacccaagggaggaggctcacagcctccctgagtcatctccccagagggtccttcctctcccagtcaccccttctccaactctccactgtacccctgagctaccagtctggcatcagttcagaccagtcccacaccctcctaaattttacttctcaataaatacctgatcatgtaaaacgcagcatttctaatgtgcagtctctgtctggtcatgtgtctgggctgaagggtcactgctcagggacagggggcagttccaggtgagatcccatgtctccgtcatcccacaccccacccaacctgccagggaaccgggtgagctccctgtgccagtgggaactgcaatccaaggcacaaaattgtcctgcagtccttgcccacctgggaagggacaggggcccagtgagaggtttgctggcgccctgtggggagattcaggagaaatgaagggggtccccggagaccagatgagggctagaggcagaaataatggaaaaaggacacccttgactcaaggccacggtctcagcaggaacagaaggtgaaattccccattgcatacgaggaaccagtcaggagagtgtttactgggtgagggataaataactgtgctgccactgggaacttgtaaaaacattgggaaaggaaacatgcaagtgtctttctaagacttgtacaatggacattggctaagtaaacatactgacaagtcctgcactagggaaccagtttaatatgatgagccacagcatatccaaaagcatgttgatctccttcttcacctttagaagacccaaaacactctgaaagataccagcgtttcctggaactagtttgtggaatatggggtgaggttgatgcacatgatgttacgggtatatgatcacatggctgtgggttggggatcaggctcaaagttaacactagcgtggggctggatgtcaagcatgaagggtgtggaccactaagtcaggcccaggtagagttaatttctgattggtttgtggctggagcttgatgatggtcagtctgcaggagcaggaggatgtggggaaattgggaaaatgagaaaagtcacaaatccaagctcaaactctgcatctattgattgcctgggggaggctaatcagagttgaattcaggatgagcttcagggctgggtcagactgaataagagctgagtgaatgtgggctgatggctccaggcaagtcctggcctccactaggagtcagatcccacaaaccctcctgcccgcagagcaccctctccctccgtagctcatggtggcgcagcctccccaccccatcccatgtacacctgctgcctcatctcagagacactcattccagtgtctctgacagcagatgatgtcagcctcctgggtgtggagaccccagctgtcttggagagtcctcagtgcctgggtactctcagaccccctgtctctgcctccagcacatcagagacatagcagctgcctccaccagagctgctgggtgatcccaacaggccagggacagagcctgcaaagacaggaatctctgcagtcacaatgaggcaaagaaagagccccttagagcttgatcacagccacccctgatccaaatcccagcctctcattagaaggaggcttgagggttctgttgccacagcacctgtctgagcccatttcatggaggggaaaactgagatgaccaagggccagatccatagtcctgctgggcacaaggccatccccagcagctgcctaatctttgactgtgttataagtttccattatggaaaactttgaacacatacataaggagacagagaaataataatgcccccaagttcccatcacccagcccccccaataagcaattcacagacattactgacccacccatagcagaataacccctccattacacaataccagacatcacatcttttcagctgtaaatatcccatttctatgctggaaagatatgggcttaaaagtaactgcaatattattaccaaacctaaatagaaattatcactaattccctaatatcaagaaataatcatgggctcctcaaatccctcacaaatgccagaagcgtattgacttagttaagtgttggtgctgtggttattttggggttttgggtggtttatttcagaattcaatatggcatcaaatggtgatgggcgcatgtgctgtcaggccagttgtcactggtgaatatttcctcaattgctctagtgctgcctggcaaggcaggagctgcaggagttgagagctgtccggggaccttcccacggttggaatacagccacacctcccaaaacaagaacccagggctatcatctacttctttttttttccccctgcaaaatggttctagcatggagggacttaactggattcagactagacattgcaaaatagcttccaaggacagggagctgctaacagcgagatcacccatgtcagattctcactcttgtagtaatgttagctgcataggatggtcaatagctacatccctcagaagggaaggaaggcagagggatgaggcttcagttcacctccttctcatgagtgctgcagagcatctgtgaattcagaggtctgcagctgggctctgttcacccaggagtgtgcttcatgctctaggaaggagccactttgcacacagatgatccggggcccagccatccttccagggtgaataattaatgtcttctctcatggtgaactctaggattcaagccatctaatgtttttgaagccactgtcattatatttaattgatgatgacaggtggccaccaatgatgaatattttcccagggggagtctccctaagtggctttagacttcctcacatggccccaggggattaaatggctcctgattactcagaggataagaggttctgtcttatcatgttcctttcttatttgtcttatgtgtctttcctgccccaggcctgggatcccccactgatctcccttcccttagtgagaggtggtatttggagaccacattctggaggctcccttatgtcccccatttgaaaaagacaacggcagccaccaccccagctgtcccacccaacatgaggccagattcggggtgcagggatgctcccaaggttaccctaacagatgtgactggcacttcatattgggaccagccaggcctcactgaccaggcctatccaactagaactactccagaaggtggggctgaaacccaccaaggttcccagaacactgcactctagggcaatcagcctctgcatgggaggagaggggcaccctctgcaccaccccatggtgttaccaaaagttgaaccatgggttggttcaactttgcagagaagagaccacctaacccatctgtggaaattcactccttagcgatactgatgctccctaagaaattcaatcctgggcctgagtgatggttggtgcaaaaaacaaattcaagatcccagtgtcctccagaagcctggatttccagggatcctgctgtgagtcacaggacgtcaccggtccccttctctttgtgggttgagtgtgggggccatgtggactccctcatgagcagatgccaccagggccactggccccagcttcctccttcacagctgcagtgggggctggggctggggcatcccagggagggtttttgtatgagcctgtgtcacagtgtgtggtattcggcggagggaccaagctgaccgtcctaggtgagtctcttctcccctctccttccccgctcttgggacaatttctgctgtttttgtttgtttctgtatcttgtctcaacttgtggtcagcctttctccctgcatcccaggcctgagcaaggacctctgccctccctgttcagacccttgcttgcctcagcaggtcactacaaccacttcacctctgaccacaggggcaggggactagatagaatgacctactgagcctcgtctgtctgtctgtctgtctgtctctctgtttgtctctctgtctctctgtttgtctctctgactgtctgacaggcgcaggctgggtctctaagccttgttctgttctggcctcctcagtctgggttcttgtcggaacagctttgtccttgggttacctgggttccatctcctggggaattgggaacaaggggtctgagggaggcacctcctgggagactttagaaggacccagtgccctcggggctgatgctcgggaatcacagagctgggacccagagccaggatccagacccagaatgaggtaggaggtggaggggctgccctgggcgtctgggggctgccagggactgagccctgagccagcctgagactcaggaaaccccgtcaggagggagaagggagaagcagactctggacaccagaaagccaggggaagggtcacaaaaggagtggatgtgacggaagggcgggctcctgggtctcttcagaacatatcccctgtgcccagggggatcagaggggcagagtccactgcgtgaaagccccactgctatgaccaggtagccgggacgtggggtggatgccagaaaagactccacggaataagagagagcccaggacagcaggcaggctctccgatccccccaggcccttgccccatacacgggctccagaacacacatttggctggaacagcctgagggaccaaaaggccccagtatcccacagagctgaggagccaggccagaaaagtaaccccagagttcgctgtgcaggggagacacagagctctctttatctgtcaggatggcaggaggggacagggtcagggcgctgagggtcagatgtcggtgttgggggccaaggccccgagagatctcaggacaggtggtcaggtgtctaaggtaaaacagctccccgtgcagatcagggcatagtggaaaacaccctgacccctctgcctggcatagaccttcagacacagagcccctgaacaagggcaccccaacacctcatcatatactgaggtcaggggctccccaggtggacaccaggactctgaccccctgcccctcatccaccccgcaggtcagcccaaggctgccccctcggtcactctgttcccgccctcctctgaggagcttcaagccaacaaggccacactggtgtgtctcataagtgacttctacccgggagccgtgacagtggcctggaaggcagatagcagccccgtcaaggcgggagtggagaccaccacaccctccaaacaaagcaacaacaagtacgcggccagcagctatctgagcctgacgcctgagcagtggaagtcccacagaagctacagctgccaggtcacgcatgaagggagcaccgtggagaagacagtggcccctacagaatgttcataggttctcaaccctcaccccccaccacgggagactagagctgcaggatcccaggggaggggtctctcctcccaccccaaggcatcaagcccttctccctgcactcaataaaccctcaataaatattctcattgtcaatcagaaatcttgttttatctcattttttcttttctcacatataattcctagcctttcctgggttctcaatttgtggtggaaagaaccctgaacccagtgggaaagttgcctatgtgaaggggttctcagttccctgggcatctctgcaggtaaggccttcctcacccagacaccccttcctcagctctccactgtacccctgagccaccagcctcgcctggctgggaccaggggggtgtcacactctcctagattctgcctttcaacagaaacctaaccacgcatcacacggcacttctcgcatgccttctgtgtctgctccagtctctgggctaaagagttgctggtccgggacaggggataggtccgctcttggtcagatgccaggtccctgccatggcatccctgaccctatgcaacaagccagtgactctggtgagctctctgtgtcaggagaatccatgatccagagtttcatattgtcctgcaagcatctggtgggctgtagctcttgccaaactgggaaataccatggcccagcatcaggatgcaggacagtccggagagggaaatcaggagaagtgaaggggtctctggggagcccagatgtgggctagaggcagaagtaagggtgaagagcacctatgagtcaatgtcatggtctcagcaggaacacagttgaaaatccccattccacacaagaccgtttagcaggaaaggagtccatacttgtgctgccaccaggatgtcctgagaagccttggagaatgaaacatacaggtgcatttcctagacttgacaatgcacgttagccaagtaaaggcaatgaaaagttctctactagggaaataatttcctgtggtaaagcttagcttatgtaaagtcacatttatccatctggcacctctaaaagccccataatattctgcaagatactagtatgtcatggaagtagtttatgaaacataaagtgagatttaagaacaaagatgttacgggtgtatgataagatggctacaggctcagggtcaggctcgaggagtgaaggaggccgtgtcaaattcatgacaagagttggagctgggccaggctgggtcagggctgtgtgaatgcagacagagggctacaggcaaggtcaggcatccatgaacactcagctcccccagaccctcctgcccactgggaccttcgccctcccttggtcacagtggtggagccttcctacccaaacctctatggaggccctggatgactgtgcgttcttagtgcccacgcaaacttagactccctgtctctgcctccagcacatcaggaatgtggcagctgagttcaccagagctgctgggtggtcccgacaggccagggacagagcccgcaaagacaggaagctctgcagtcacaatgaggcagagaaatggccccttggtgcttgatcacagccacccctgatccaaatcccagcctctgaattagaagaaggctaaaaggttctagtggccacagtccctgtctaagcccatttcacaaatgagaaaactaagaccacccaaggagggccagttacgtaggcctgctgggtacaaggccaaggtctacttcacacccagcagctgtccaaagactgagctgtgtcataagtttatattatgaagaactctgaacatataaataaggagacagaaaaataacagtgtcccatgttctcatcacccagcactcaaaataagcaattcacagatgatgccgacccacccacagcaaaataaattctcccttacacaacatttagaaagaaatacaagacatcagatctgttcagctgtaagtactccattactgtcctggaatgacatggaccttaaaataactataatatcactaccaaacctaaatagaaattatcactaattccctaatatcgagaaataagcagggtctcctcaaatgcatcagaaacaccagaagtgctttggcttagttacatgttggtgctgttggtatttgggggtttaagtttatatgaggagcaatatgacatcaaatggtgatgggtgcatgtgccatcaggctggttgtcactggtgaatatttcctcaattgctctagagcctcccggcaaggcaggagctgcaggagctgagagctgtctggagaacttcccctggctgctatacagccacgcctcctggagcaggaacctagggcttccctcagcttttattttcctggaaaatgattctagcatgaaggggattaacttgattcagattggacattgcaaaatagcttgcaaggacagggagctgctaccagcagagtcacccatgtcagactgccactcttgtagtaatgttagctgcataggatggtcaatagctacatccctcagaagggaaggaaggcagagggttgaggcttcagttcacctccttctcatgagtgctgcagagtgtctgtgatgtcagaggtctgcagctgggctctgttcacccaggagtgtgcttcatgctctaggaaggagccactttgcacacagaagatccggggcccagccatccttccagggtgaacaattcatgtcttctctcatggtgaactctaggattcaagccatctaatgcttttgaagccactgtcattatatttaattgatgatgacaggtggccaccaatgatgaatattttcccagggggagtctccccaagtggcttcagacttcctcacatggccccaggggattaaatggctcctgattactcagaggataagaggttctgtcttatcatgttcctttcttatttgtcttatgtgtctttcctgccccaggcctgggatcccccactgatctcccttcccttagtgagaggtgatatttggagaccacattctggaggctccctcatgtcccccatttgaaaaagacaacggcagcctccaccctagctgtcccacccaacatgaggccagattcaggggtgcagggatgctcccaaggttaccctaacagatgtgactggcacttcatattgggaccagccaggcctcactgaccaggcctatccaactagaactactccagaaggtggggctgaaacccaccaaggttcccagaacactgcactctagggcaatcagcctctgcatgggaggagaggagcaccctctgcaccaccccatggtgttaccaaaagttgaaccatgggttggttcaactttgcagagaagagaccacctatcccatctgtggaaattcactccttagcgacactaatgccctctaataaattcaatcctgggcctgagtgatggttggtgcaaaaaacaaattcaagatcccagtgtcctccagaagcctggatttccagggatcctgctgtgggtcacaggatgtcaccggtcccctctctctgtgggttaagtgtgggggccatgtggactccctcatgagcagatgccaccaggaccactggccccagcttcctccttcacagctgcagtgggggctggggctaggggcatcccagggagggtttttgtatgagcctgtgtcacagtgttgggtgttcggcggagggaccaagctgaccgtcctaggtgagtctcttctcccctctccttccccgctcttgggacaatttctgctgtttttgtttgtttctgtatcttgtctcaacttgtggtcagcctttctccctgcatcccaggcctgagcaaggacctctgccctccctgttcagacccttgcttgcctcagcaggtcactacaaccacttcacctctgaccgcaggggcaggggactagatagaatgacctactgagcctcgtctgtctgtctgtctgtctgtctctctctctctgtttgtctctctgtctgtctgacaggcgcaggctgggtctctaagccttgttctgttctggcctcctcagtctgggttcttgtcggaacagctttgcccttgggttacctgggttccatctcctggggaattgggaacaaggggtctgagggaggcacctcctgggagactttagaaggacccagtgccctcggggctgatgctcgggaatcacagagctgggacccagagccaggatccagacccagaatgaggtaggaggtggaggggctgccctgggcgtctgggggctgccagggactgagccctgagccagcctgagactcaggaaaccccgtcaggagggagaagggagaagcagactctggacaccagaaagccaggggaagggtcacaaaaggagtggatgtgacggaagggcgggctcctgggtctcttcagaacatatcccctgtgcccagggggatcagaggggcagagtccactgcgtgaaagccccactgctatgaccaggtagccgggacgtggggtggatgccagaaaagactccacggaataagagagagcccaggacagcaggcaggctctccgatccccccaggcccttgccccatacacgggctccagaacacacatttggctggaacagcctgagggaccaaaaggccccagcatcccacagagctgaggagccaggccagaaaagtaaccccagagttcgctgtgcaggggagacacagagctctctttatctgtcaggatggcaggaggggacagggtcagggcgctgagggtcagatgtcggtgttgggggccaaggccccgagagatctcaggacaggtggtcaggtgtctaaggtaaaacagctccccgtgcagatcaggacatagtggaaaacaccctgacccctctgcctggcatagaccttcagacacagagcccctgaacaagggcaccccaacacctcatcatatactgaggtcaggggctccccaggtggacaccaggactctgaccccctgcccctcatccaccccgcaggtcagcccaaggctgccccctcggtcactctgttcccgccctcctctgaggagcttcaagccaacaaggccacactggtgtgtctcataagtgacttctacccgggagccgtgacagtggcctggaaggcagatagcagccccgtcaaggcgggagtggagaccaccacaccctccaaacaaagcaacaacaagtacgcggccagcagctacctgagcctgacgcctgagcagtggaagtcccacagaagctacagctgccaggtcacgcatgaagggagcaccgtggagaagacagtggcccctacagaatgttcataggttctcaaccctcaccccccaccacgggagactagagctgcaggatcccaggggaggggtctctcctcccaccccaaggcatcaagcccttctccctgcactcaataaaccctcaataaatattctcattgtcaatcagaaatcttgttttatctcattttttcttttctcacatataattcctagccttccctgggttctcaatttatggtggagggaattctgcacccagtgggaaagtcacccaagggaggaggcttacagcctccccgagtcatctctctggaaggtccttcctcttccagtcaccccttccccaactctccaccatacccctgagcctccagcctggcctcagctcagaccagtcccacaccctcctcaattttacttctcaataaagacctgatcatgtaaaacccagtttccaatgtgtcgtctgtgtctggtcatgtgcctgtgctgaagggtcactgctctgggacaggaggcagtttcaggtgagatcccatgtccccgtcaccccacaccccacccaacctgccaggaaaccgggtgagctccctgtgccagggggaaccatgttccagagcagaaagttgtccctgcagagtggtccctgaaatgcagttcttgcccacctgggaaggatgtggagcctagtgaggacagagtggtggccctgagcagggcatcggggagaaacgaggagtgttccaggaccccctgctttgggctagagacagaaaacccttgagcccaggccaagatcagagcagaaacagggttgaacttccctgtcccatccatgatacccagttaggagaccatttactaggtgccatcaccttacgttacattacaacattacgtgattgtgccatcacccgggagacatgaaaaaggctggaaaatggaacccttcagtgtagtttacactttcacaatgtacgttagctatgaaagatgctgacaagtcctgcagttggaaaacagttcatgttacataaccttgcaagtcaagaattctattcagtgtcccaacccacttagccctagagcgctcttcaagacactggtgttcatgtcactagtgctgggacatgggctgaggctgaggcacacagatgattcgttgtgatcaaatgggtcaggctcagggttaacactggccaggtcagaaagagagcatagggctgagatctcaaccatgaagagtctcgaattctaaagtcaggggacgcagtagagttagattatggttatggctggagccatgatggccagcctgtgtgagggtaggactcaggtggactgggtcaaatgagaaaggcaccatcccaagcatagaatcggcatccattggttgtctgatggaggctgtgtcaaaatcatactcgcccaagaatcagggccaggtcacactaggtcagggcagggtaagtgtgacttaagggctacaggcaggtcaagttttcatgggactcagctaccttagacccctccccaccagggcctactccctccctcaatcatgtggttcagcccctccatgtgcacctacaccctgatgtcagagacacaatcatcccagggtccctgacagcgagtgaggtggccttgggagatgcacttcccagccctcctcatcagtcttgggcactgtcaggccccttcttggtgcctccagcacatcagcggtgtggcaggtgccttcaccagagctgctgggtggccaggccaggcctgagacagagcctgcaagggcagagaactctagggccatagtggggcagagaaggggttcctcttggagcctaatcatagaacccctgcctcaagtcacaacctacaagttagaaggaaacttaagggtcctgattcccaccaccctgtctggccccatttcatagatgtgaacgctgagacccctatagcaaagaggaccgctttgatctccaccttctcaatggccctgctgggtaggatcccctctggatgtcccctggtgctgtcccaagactaatctctctaattactgccttgtaagatattacggaaactgacagcaagaaaataaaaaaacaggaggataatacagctcatgttgacccacccacaatcaagtaacctcttttacacagttgtttgaagcaaattgtagacatcatgtccattagtctaaatattccatttgtgtctctaaaaatatggacccccccaaaaaaactacattcttacaaacctaaatataaatatctaattctttcatatcaaaaaaagaatgtttcccatcaaatacttcacaaatatcctatgcttctttcactagacctgtgtttgtgttgttattctgtggttttccatttcatttctatgaggattcaatatggtttgaaattgtgactggtgactgtgtttttagacctgttctgtctgcaggtatcttcctcattgatttttaatttccttgcaaggcaggagctacaggagctgggggttggtcccaggaccttcccatggtcaggatacagcctgtggcctccccaagctggaaacaagcgctcctctctgcttctgcgtttcctgaaaattggttcttggccagaaaggtttaacaaggctcagtgtgacttttcagcaagaccgcttggctactgggctcccatgtggggtcatctatttgtgacgttagctgggcttcacactttgtatccagtgccattagatggtatatggatgcaaggtgactgcatttcagttcgaccaccttttccttctactgactgtctgtaaaaggtgtgccctcatatgttctttgctcctctgggagtgtgattcttatttcagtaagaaatagcatagacatgttgagtctttcctttcatttagcatcttaataatgatgaccatgttgcctgccatctcgtgaagatgaacaattatttcatggtgagctcaaagttatgttactgtatgtgactcacttgagtccaccatggttctattttattgatgatgacaacgacccaccgtggcccactcagtgcctcttctggtggccccaggatcctcctgaaggaacccaggagacctcgatggctttccactctctgttcacaatctatcctgggcacatctttctcctgccttgtgcctggaattgcccattaaccccaagtggactagtccccataactgggaggtgggatttagtgaccacacttggggtgcttctcacacagcccttttgagtcagacactccagacatacccagaaatgagacaagaccctgaaagggtaacaggggcttgcttccaacttctccctggaggttgaggctggcatttcatactaaaacctagtgagacccatcccaaactaagacaacacaaggaggacggaagtgagacgccctggagttgtggttgtggtcacgttggagcttcccatgactgctgactctggggcaagctgcccctcctctaaggcactcactggggacacctgaggacgcctcctgctcttaccctgtagtcacaccaagagatcagggttacaacaaccctatagagaatccctgtccccttccatgtcacttcactccttcgtgaagcaaatgccctcaaggagctcattcccattcctgggtcacagtcacctggaaaacctgatccagacaccaacctcctcaggcctcgccatttccagacgtcccgttactgcatacgcttggtcgactgtcccatctcagcttgagaagggcaggcaggtgtgtggactctgctgagcaaatgccttccaggggcagtggtctggcttcctgcaccatagcttcaggtgggggatggggagggggagttaggggccccagggaagagtttttgtatgaacctgtgtcaccgcattttgtatttggtggaggaacccagctgatcattttagatgagtctcttcttccctttctttccctgccaagttggtgacaattttattctgatttcgatctttgtctgtgacttgccacagcctgtggtcagggtttcctttgggacctcggtcctgggaggctgatctctctcctccctattcagacccctgtatgcctcagctggtcactgagacaccttcatctcctctgaccccagaggcagggagctccaagacaaggccacactggtgtgtctcatgagtgacttctacccgagagccatgacagtggcctggaagatagatggcatcaccatcacccagggtgtggagaccaccacaccctccaaacagagcaacaagtatgcggccagcagctacctaagactggcacccgacagtggaagtcccacaacctctacagctgccaggtcacgcatgaaaggaacactgtggagaagacagtggcccctgcagaatgttcttaggtccccgaccctcacctacacacgggggcctagagctgcaggatcagggcatgtgtctcccctcccactccaagtcatccagcccttctccctgcacccagtaaccctcaataaatatcctcattgtcaaccagaaatcctgctgtctgtcttcatttcttatctcatatttagtttgcaacctccttaaattctaagcaaggatgaggaaaatccaggtgcccagtttatcgggtgagaagtccatggtggtgccatcaccaggaacttgtggaaaggtctgggaatggaaactcacaggtgaatttcacagattttcacaatacagggtggctaagtaaagacacttacaagtcctgcaatagggaaacaggaagtccagaatcctgctcaccatcccagccaacttagtgagccctaggatgctctgcaagatactggtgttcacgtcgctagctctggaaagtggggtgaggctggggcacacgggtgatcagttatgatcagatgggcttagggtgaggttcaaagttaaccagcacgtggctgagatctcaaccatgaagttcccaattctaaagtcaggctctggggtggagtgagtatgtgcttggtgtgtggctgagcctgtgatggtcagctcgtgtgaggggaggactcctgtggactgagacaaatgagcaaagacaccatcccaggcacagaacgggcatcccatggttgtcggggagagtctgtgtcagagtctcattctggactagagtcaaggctgggtcacgcaaggtcagcacagggtgaacatgacctaggggctatctataggcaaagtcaggctttcacgggatctcaactgccccaaacacccccatcccaccaggccccactccctctgtcactcacgttgttccgtcccctcaccccctgcaccatggtgcaccggcagcctcactcagagacaccctcatcccggggtccctgacagtgggcaatttggtcccttgaaggccttgacaggctcggttaatccatagtgcccgggctgggacccccactgtttctggttcatcagggacatggcagcagctgctgggtggccagccaggacaggaacagagctgcaaggcctgggggctttttccacaatgatacacaaagagaggggcccctttggagctcagtcccagccacccctgccccaaatcacagccgtgagctgaattgaatttcaggtgcccagagtccctcagcctctgtttgacccatttcacagctatgaaaattcaagcccatgggagacactgtcccaagcttcaccctctctataagttgtacatttttatgatgaagatctctgaacacaaaaatagggagacagaagaatagtaatgactccaaggttcccatcagccagtccgcagcatcatccattttcagataatgcggacccacccacagcagaataactaaactactccttcaagcaagggtgtgaagcaaatgctagtcatcacacacacaactggagagaatatcaaggatttcttgacatcaaaaatagttaatgagagtcttatcaaatgtcttgtgaatatcattgtgtctatttttgtcgactttgtggtgctgttgcatatttgtgatttaatttcatttctatgtggattaaatacttgacgttatcattggtgaatgtgtttttagacccattccatctgcaggtgtctcccaaattgctctagctttccctggcaaggcaggagctgcaggagcagagagctggtcccgggacctcccacagtcgggatgcaggcgccacctccctgagcaggaacccagtgcttccctcaacctctcttttcctgaaaaatggttctagcatcaagaggctcaagggggttcaggctggacattggcaaactcgcttcccaggacacgtggctacttccagcaaagccacccatgttgtgttgtcattctttcagtgacattagctgcatttgatgatcaataacttcgcgcctcagatgagaaggaaggcagatggtcaagacttcggtccacctccttctcatgagggcttccagaagggagggcacagcagctgcaccgtgcgctcaggagtgtgcttcatgctttgggaagaagaaaaaatgtacattcttcccttttgttcaccactttgataactgatgatctggtgcccagccatcctccagggcgcacagcacaatgtagtaccggagtgagctctagcgtgtgaggacatctgacatgtgggctccactgcagatatactgaattgcaatgacaatgcggctacaaaacataaacatttacccactgggcgcctcctcaggtggcatctgattttctcccattgccccaggagcttccatggctcctgatttctcggaggatgagaggttctgtctcatcatgtccctttcctgccccaggcctgggatcccgcactgacctcacctcccttagcagaaggtgatatttggagaccacactcgggagctcctttatgtccctcacatttgaataaggcagtggcagccactaccccacctcacccaccaaaatgagaccaggttgaggggtgcaggagatccttccattttaccctggaggatagggctggcatttccagtggggaccagccaggcctcactggccaggcccatcccaactaggacaagcccagggaaggctgggctgaggctcctggagtcacagataggttcatgggaagcttcccaagacaccgcactctagggtaaccagcttcttcctggagggagagggcactctctgcatcaccccagggcgtcaccaagcagtcagtgtcgagtcagctccaccagggagaccatttatccctgaccatgggagttcactcctagtgacacagtgccctccaataaactcatccccatggctgcatgatggttggtgggaaaaccaaatccactgtcctccaggaaccaggatttctagggatcctgctggtcacaggatgtcacctgtccccttctctctgtgggggtgagtgtggcagccgtgtgaactccctcatgagcagatgccaccaggggctgtggcctcagcttcctccatcacagctgcagcgggggttgggggtagaggcgtccagagagggtttttgtatgagcctgtgtcacagcactgggtgtttggtgaggggacggagctgaccgtcctagatgagtcttttccccctccttccctggtctccccaaggtactgggaaattttctgctgcttttgttcttttctgtatcttgtgttgacctgtggtgatgctttctctctggagcctaggccctggtcaaggacctctcccctccctgtttagacccttacctcagtgggtcaccaagaccccttcacctctgacctcagatgtagggcactagactggatgacctactgagactcatctgtctgtctgtctgccagagccaggctgcttccctaaaacttgctcagttctgtcctcccccacctgggcttctgtctaacgaactttgtgcaagggaaactgaggccccatctcatgagggagagggaacaaggggctcgaaggagtgaccacctggtggactttagaaggacctgaaaccctcagagccaagataggggaatgaaaactcagagtctcagggcccagtcccctggactgtgggactctggatc

SEQ ID NO: 45 - DNA, 3088 bp, Homo sapiens
gctggaagggtttctttggccctgagtgaagagagacccagagggaacactgaggtgcctgcccaaccactctgtcccggtttccttcagcaggaccaggtgagagaagccatgctggtcgttcagatgcctttctcctttcccatggcccacttcatcctctttgtctttacggtttccactatatttcacgttcagcagcggctagcgaagattcaagccatgtgggagttaccggtgcagataccagtgctagcctcaacatcaaaggcactgggacccagccagctcagggggatgtggacgatcaatgcaataggccgcctggggaaccagatgggcgagtacgccacactgtacgccctggccaagatgaacgggcggcccgccttcatcccggcccagatgcacagcaccctggcccccatcttcagaatcaccctgccggtgctgcacagcgccacggccagcaggatcccctggcagaactaccacctgaacgactggatggaggaggaataccgccacttcccgggggagtacgtccgcttcaccggctacccctgctcctggaccttctaccaccacctccgccaggagatcctccaggagttcaccctgcacgaccacgtgcgggaggaggcccagaagttcctgcggggcctgcaggtgaacgggagccggccgggcacctttgtaggggtccatgttcgccgaggggactatgtccatgtcatgccaaaagtgtggaagggggtggtggccgaccggcgatacctacagcaggccctggactggttccgagctcgctacagctccctcatcttcgtggtcaccagtaatggcatggcctggtgtcgggagaacattgacacctcccacggtgatgtggtgtttgctggcgatggcattgagggctcacctgccaaagattttgctctactcacacagtgtaaccacaccatcatgaccattgggacgttcgggatctgggccgcatacctcacgggcggagacaccatctacctggccaattacaccctccccgactcccctttcctcaaaatctttaagccagaggcagccttcctgccggagtggacagggattgccgcagacctgtcccccttactcaagcactaatgctggcccattctttgagaccttttctccttctctgcctccctcaagatgagtgcccgggcatgagaagcacatggttccatgagcaggacccatctctcttctgtgaagatgcgttgggctgcaagtaacagaaatctcagtgaacagtggcctggcgtggtggctcatgcctgtaatgctcgcactttgggaggccagggtgggtggatcacttgaggtcaggagttcaagactagcctggccaacatggtgaaaccccatctcgactaaaaatacaaaaattagccaggcgtggtggtgcacacttgtaatcccagctactcgggaggctgaggcaagagaatcacttgaacccaggaggcggaggttgcagtgagccaagatggtgccgctgcactccagcctgggtgacacagcaagactccatctcaaaaaaaaaaaaagaaaaagaaatgaacgggttcaaagaccataatcatgcatatcacataagaccagaagtggcccaggtccagggtcagttaatttagcagctccacaaagtcatcagtcacctgagctccatccatcttcacatgctgtgctaccatttcttagctgtatcatcccatggtcccaaaagggctgctacacatccagccatcacatgcagataattcctttcaaaaacagcagaaagaggctcgttcttgtcttggtcccttttgaagaatgaatgaaaccttcctaagccttccagcaatttccccccaactccgatgggtaggaattgtcacatacccatgtgacccgataggaggcaaaagaaatgagacttctgggattagtttagcctcagattctgcagctgagaagttgatcagccacctctgaaggacatgcagcttgcagaaaattagggtggtgttaccaaggtgaaaaggggaaatggctttagagtagacaacagagatgccctgaggggttgtgtaggttgttcactgcaggaagtcccctggttaagaaggcaagtggggtttaaacagacccacagtctactcatcaaaccaggtgtccttggcattgtgtccacccagagagctcactgttttcttttctttttcttttctttttttttttttgagatggagtcttgctgcatcccccaggctggagtgcagtggcatgatcttggctcactgcagcctccgcctcccaggttcaggcgattctcctgcctcagcctcccgagtggctgggattgcaggtgcgtgccaccacgcccagctaattttgtacgtttagtggaaatggagtttcaccatgttggtcaggctggtctcaaactcctgacctcatgatccgccttcctcggcctcccaaggtgctgggattacaggtgttagccactgcgcccggccctagagctcactgttttctagttagtccatctggaagtggagcctttttccagtttgcacaaatgtgccatattggcttgtagctggcatgcatccaagtccataggtcctgcctcttcaatcctggctttctagggcctgggatgatcattgctagaactgagagaccagcctggctgagtgaacttcagggcgttccgttcattctttcagtaaatggttgcagcacatgttttacatgtcaggcagtgaaaccccccacagcagccttccctctcagaggatacatttgtaaccattacacagtcatcaaaggaataattttttttaatcaccagtgtgcatacagtcatggagctgggtattcccagctaccagggaggctgaggtgggaggattgcttgatgccaggagttagggaatatagtgcaccgtgattggacttgcgaatagccactgcactgcggcctggacgacgtagtgataccctgactcttataaataaataaatgaataaacacaattatgactttgcggatggg

SEQ ID NO: 46 - DNA, 492 bp, Homo sapiens
  misc_feature: n=a,t,g or c
tgaaggagagacagagaactctgggttccgtcgtcctgtccacgtgctgtaccaagtgctggtgccagcctgttacctgttctcactgaaaagtctggctaatgctcttgtgtagtcacttctgattctgacaatcaatcaatcaatggcctagagcactgactgttaacacaaacgtcactagcaaagtagcaacagctttaagtctaaatacaaagctgttctgtgtgagaattttttaaaaggctacttgtataataacccttgtcatttttaatgtacaaaacgctattaagtggcttagaatttgaacatttgtgggtctttatttactttgcttcgtgtgtgggcaaagcaacatcttccctaaatatatattaccaaggaaaagcaagaaggcagattaggnttttgacaaaacaaacagggccaaaagggggcntgacccggggcngagccttggtgagggggcagggctgnggaggggcagtt

SEQ ID NO: 47 - DNA, 286 bp, Homo sapiens
  misc_feature: n=a,t,g or c
gctctnagttanantctttattgactttagccaaggnagngccctgagatgggggtccagagagagaggcttggtggggctacgtcctgggggccaggttggttctgaggggtagaaggccatccacccattcgcacggctgctccaggagggcttgccacagctgcttctcctcaggtgtggaatccatccagggcacctgcagcccatagctgctgcctgggatntgggtnggcagggtttnagggcatgatcacactggacaccttggggcccccaaacacct

SEQ ID NO: 48 - DNA, 481 bp, Homo sapiens
  misc_feature: n=a,t,g or c
ttttttttaatttttaaaatatttaatacatttttgttctacaaagaatgagcatttcttaaatattacaaacagtgaaacaaatatactagcttacagatatgtacaatttatgactttatacttcaaaaatgcaggaagataaattatatatttnatatacatgtaattttagatagaatgaacaattcaatattgctcttgtgttggtcttgctgcattgtatgcatgcccatggcttgtcgctggatggaggaggggctcatggggatagangggaagtcatggagccccatgctcatgcccagagcgccatcttcaaagncaatatttaattaaatattaacttattctgcctggggtcaaaaactgctatgcccatatgccaatgtagggtgtgttttcaagganccacagctaccatatttggggttgggaaacgtacaatgccttaaaaaatctattcngtggtactaactcc

SEQ ID NO: 49 - DNA, 415 bp, Homo sapiens
  misc_feature: n=a,t,g or c
ntgantggaaggagtaaaactctttattcatagaacacatgactgttgatgtaatttacaaaaacaccatgagaactcacagtttagcaaggctgaaggatacaagttcaacatcaattgtatttctatttactagcaacaagtggttagaatttgaaattttaaaataccatttagcatcaaaactatgaaatgctgacatggtagacctgtacactgaaaactacaaaagattattaagagaaatagaagacaaaacattaatacctagggnagacagaccttgtttatagggccagaaggacttcaatattattaaggntggtcaattctcccaacagttttattataaattccaatggcaattctcaattcagggngccccacgggggttttttggtggtggtggttgtag

SEQ ID NO: 50 - DNA, 195 bp, Homo sapiens
  misc_feature: n=a,t,g or c
cataatacatatatttattgccatcagagttctgcaattctcataaaattagagtcagatggaattcagggacacgtgcaagttttggaaatggacacagataacagtatagaactgtacacaaaataattaccatttattaaacacactggtttagnacaccctggatggatgagaatgngcnccataattttt

SEQ ID NO: 51 - DNA, 1537 bp, Homo sapiens
gctctcattaccttctgcccatcacttaataaatagccagccaattcatcaacattctggtacactgttggagagatgagacagtcacaccagctgcccctagtggggctcttactgttttcttttattccaagccaactatgcgagatttgtgaggtaagtgaagaaaactacatccgcctaaaacctctgttgaatacaatgatccagtcaaactataacaggggaaccagcgctgtcaatgttgtgttgtccctcaaacttgttggaatccagatccaaaccctgatgcaaaagatgatccaacaaatcaaatacaatgtgaaaagcagattgtcagatgtaagctcgggagagcttgccttgattatactggctttgggagtatgtcgtaacgctgaggaaaacttaatatatgattaccacctgactgacaagctagaaaataaattccaagcagaaattgaaaatatggaagcacacaatggcactcccctgactaactactaccagctcagcctggacgttttggccttgtgtctgttcaatgggaactactcaaccgccgaagttgtcaaccacttcactcctgaaaataaaaactattattttggtagccagttctcagtagatactggtgcaatggctgtcctggctctgacctgtgtgaagaagagtctaataaatgggcagatcaaagcagatgaaggcagtttaaagaacatcagtatttatacaaagtcactggtagaaaagattctgtctgagaaaaaagaaaatggtctcattggaaacacatttagcacaggagaagccatgcaggccctctttgtatcatcagactattataatgaaaatgactggaattgccaacaaactctgaatacagtgctcacggaaatttctcaaggagcattcagtaatccaaacgctgcagcccaggtcttacctgccctgatgggaaagaccttcttggatattaacaaagactcttcttgcgtctctgcttcaggtaacttcaacatctccgctgatgagcctataactgtgacacctcctgactcacaatcatatatctccgtcaattactctgtgagaatcaatgaaacatatttcaccaatgtcactgtgctaaatggttctgtcttcctcagtgtgatggagaaagcccagaaaatgaatgatactatatttggtttcacaatggaggagcgctcatgggggccctatatcacctgtattcagggcctatgtgccaacaataatgacagaacctactgggaacttctgagtggaggcgaaccactgagccaaggagctggtagttacgttgtccgcaatggagaaaacttggaggttcgctggagcaaatactaataagcccaaactttcctcagctgcataaaatccatttgcagtggagttccatgtttattgtccttatgccttcttcttcatttatcccagtacgagcaggagagttaataacctccccttctctctctacatgttcaataaaagttgttgaaagattaac

SEQ ID NO: 52 - DNA, 2750 bp, Homo sapiens
tatcgaattccgggtggagggacctggcaaagcgccaggccccgcgtgggctcccggcgagcggttgatggcgagggggcgcggcgcgggctctgtagcccgagttcccgacgctggaggcccggcccgcctcagccgcattgtcccgggccgcgcgcaccggccctgagctgcgccgccgcagcacccgcccgccgcccgcggggccatgcggagagccgccgggatggaggacttggctccgcggaggaagaggagtcctggtacgaccagcaggacctggagcaggacttgcacctagctgcggagctggggaagactctgctggagaggaacaaggagctggaggggtccctgcagcagatgtactccaccaatgaggaacaggtgcaggagatcgagtacctaaccaagcagctggacacgctgcggcacgtgaacgagcagcacgccaaagtctatgagcagctggacctgacagcccgggacctggagctgaccaaccacaggctggtgctggagagtaaggctgcccagcagaagatccatgggctgacggagaccattgagcgcctccaggctcaggtggaggagctgcaggcccaggtggagcaactgagaggcctggaacagctgcgagtgctccgggagaagcgggaacgcaggcgtaccatccacaccttcccctgcctcaaggagctgtgcaccagcccccggtgcaaggatgctttccgcctacacagttcctccctggagctgcccgcggcccctggagcaggagaacgagcggctgcagaccctggtgggggcgctgcgctcccaggtgagccaggagcggcagcgcaaggagcgggcggagcgcgagtacaccgcggtgctgcaggagtactcggagctggagcgccagctgtgcgagatggaggcctgtcgcctgcgtgtgcaggagctggaggccgagctgctggagctgcagcagatgaagcaggccaagacctacctactgggtccggtacgaccacctggccgaggccctgctcgcacccctcacgcaggcccctgaggccgacgatccccagcccggccgcggggacgacttgggcgcccaggacggggtctcctcaccggcagcctctccaggccacgtggtgcgcaagagctgcagcgacactgcgctcaacgccatcgtggccaaagacccagccagccggcacgcgggcaacctcacactgcacgccaacagcgctgcgcaagcggggcatgtccatcctgcgggaggtggacgagcagtaccacgcgctgctggagaagtacgaggagctgctgagcaagtgccggcagcacggggccggagtgcgcgacgccggcgtgcagacctcgcgccccatctcccgggacagctcgtggagggacctgcgcgggggtgaggagggccagggtgaggtcaaggcaggagagaagagcctgagccagcacgtggaggccgtggacaagcggctggaacagagccagcccgagtacaaggcgctcttcaaagagatcttctccaggatccagaagaccaaggctgacatcaacgccaccaaagtcaagacgcacagcagcaagtgacccttctccggcctgcagcctcccccagggtggaagccgtggggtccctcaggcctgggcggtgcagcttccagagagcgagcgccctttagcggcctgccaccacagcacgcggcctcctgatccggaagcacgcagcatgttccctgctgagcggaggcagcccacctgtcctgcctcccaggagcccttggccacctcgcgccagcccaaaggcgcagctctgagttcaaagccaaatgtccccactaccccagggatcccccagctcccccagcccctggcttcctgaccctgcgcctcaccctcagactcctgaccaggcttctgaaagccattctggatcagttgggctttttttttttttggttaatttgtttttctaaaagatttgcaatcaaggtctccttgaccccttgccacactggaacgcttaaaggggaccccagggccagcgttaggggtcctggaccacccactgcttctccccaaccctgatgcgctgacttcccttagcaccagctgtcccacctccagggtcctgaccaggtcagagatgtcccctgccatgcgagcaggaagcctcagctgggcctggagtgtccctgctccagccctgccagggacggtttctccctggatacacttggcccaccgcagatctgtagccagtcagaggaggaggagaaggagcccctcagcagagtggtgcagtttcgctcagagcttgtctccttggcttccttccccagaaatgacctgctgggccttagctttccaggggccggggcagtggggagcccccatcccttcacaccgccaccaactaaaccaaagcttggcctctgactcccgtctctgtgcttgcccccatctcagggaccatgatgtctcagtcactccacgctccccacaggccaaccctggcacaggtcatgtctgcagcccccagaatcttctggacatgcaccaccagccggtggtcccaatgtccacccctgcctccccttcactggggactggggttttcgccccatgctgcatcgtcgttgtattgggatggggctgaggaacatgctccctcccataaaatgcctgctcttcacctcccacctttgtggggggcttttgaggacccagct

SEQ ID NO: 53 - DNA, 1778 bp, Homo sapiens
tagaagtttacaatgaagtttcttctaatactgctcctgcaggccactgcttctggagctcttcccctgaacagctctacaagcctggaaaaaaataatgtgctatttggtgagagatacttagaaaaattttatggccttgagataaacaaacttccagtgacaaaaatgaaatatagtggaaacttaatgaaggaaaaaatccaagaaatgcagcacttcttgggtctgaaagtgaccgggcaactggacacatctaccctggagatgatgcacgcacctcgatgtggagtccccgatctccatcatttcagggaaatgccaggggggcccgtatggaggaaacattatatcacctacagaatcaataattacacacctgacatgaaccgtgaggatgttgactacgcaatccggaaagctttccaagtatggagtaatgttacccccttgaaattcagcaagattaacacaggcatggctgacattttggtggtttttgcccgtggagctcatggagacttccatgcttttgatggcaaaggtggaatcctagcccatgcttttggacctggatctggcattggaggggatgcacatttcgatgaggacgaattctggactacacattcaggaggcacaaacttgttcctcactgctgttcacgagattggccattccttaggtcttggccattctagtgatccaaaggctgtaatgttccccacctacaaatatgtcgacatcaacacatttcgcctctctgctgatgacatacgtggcattcagtccctgtatggagacccaaaagagaaccaacgcttgccaaatcctgacaattcagaaccagctctctgtgaccccaatttgagttttgatgctgtcactaccgtgggaaataagatctttttcttcaaagacaggttcttctggctgaaggtttctgagagaccaaagaccagtgttaatttaatttcttccttatggccaaccttgccatctggcattgaagctgcttatgaaattgaagccagaaatcaagtttttctttttaaagatgacaaatactggttaattagcaatttaagaccagagccaaattatcccaagagcatacattcttttggttttcctaactttgtgaaaaaaattgatgcagctgtttttaacccacgtttttataggacctacttctttgtagataaccagtattggaggtatgatgaaaggagacagatgatggaccctggttatcccaaactgattaccaagaacttccaaggaatcgggcctaaaattgatgcagtcttctattctaaaaacaaatactactatttcttccaaggatctaaccaatttgaatatgacttcctactccaacgtatcaccaaaacactgaaaagcaatagctggtttggttgttagaaatggtgtaattaatggtttttgttagttcacttcagcttaataagtatttattgcatatttgctatgtcctcagtgtaccactacttagagatatgtatcataaaaataaaatctgtaaaccataggtaatgattatataaaatacataatatttttcaattttgaaaactctaattgtccattcttgcttgactctactattaagtttgaaaatagttaccttcaaagcaagataattctatttgaagcatgctctgtaagttgcttcctaacatccttggactgagaaattatacttacttctggcataactaaaattaagtatatatattttggctcaaataaaattg

SEQ ID NO: 54 - DNA, 892 bp, Homo sapiens
gcgcgccagtttcaggatgcagggtctaggagaggagccgcaatcgtgtctggggccccagccaggctggccggagctcctgtttccgctgctctgctgcctgcccggggtaccaacatggcccagaagcgtcctgcctgcaccctgaagcctgagtgtgtccagcagctgctggtttgctcccaggaggccaagaagtcagcctactgcccctacagtcactttcctgtgggggctgccctgctcacccaggaggggagaatcttcaaagggtgcaacatagaaaatgcctgctacccgctgggcatctgtgctgaacggaccgctatccagaaggccgtctcagaagggtacaaggatttcagggcaattgctatcgccagtgacatgcaagatgattttatctctccatgtggggcctgcaggcaagtcatgagagagtttggcaccaactggcccgtgtacatgaccaagccggatggtacgtatattgtcatgacggtccaggagctgctgccctcctcctttgggcctgaggacctgcagaagactcagtgacagccagagaatgcccactgcctgtaacagccacctggagaacttcataaagatgtctcacagccctggggacacctgcccagtggccccagcctacagggactgggcaaagatgatgtttccagattacactccagcctgagtcagcacccctcctagcaacctgccttgggacttagaacaccgccgcccccctgccccacctttcctttccttcctgtgggccctctttcaaagtccagcctagtctggactgcttccccatcagccttcccaaggttctatcctgttccgagcaacttttctaattataaacatcacagaacatcctgga

SEQ ID NO: 55 - DNA, 13500 bp, Homo sapiens
  misc_feature: n=a,t,g or c
aagcttccttcttggaattccaaactaataaatgagctaactccgccccagccccttagtccctccctgcaatccacctacctctgcagacatcttcttccaaggaaccttgcttgggaaacccacaccagacacatccatcatggcgtctacagccgcatgggcgtgcgtccctctgtttatatggccagagccccgcctcgctccgcccctttaaacttggtgggcggaccgaggcggggctcagaccaggccccaccccgatcagccacgtccatcgccctgatttccaggccctcccagtccctgggcgcacgtcccggattcctcccacgagggggcgggctgcggccaaatctcccgccaggtcagcggccgggcgctgattggccccatggcggcggggccggctcgtgattggccagcacgccgtggtttaaagcggtcggcgcgggaccaggggcttactgcgggacggccttggagagtactcgggttcgtgaacttcccggaggcgcaatgagctgcattaacctgcccactgtgctgcccggctcccccagcaagacccgggggcagatccaggtgcgggggccagccctgcgcgtggctggggatgaggtggtcgtggtgatagcctgtgtccaggcatccgcgcagggcgggccctcaaatgacctcaccttctctcctaggtgattctcgggccgatgttctcaggaaaaaggtaatggcttcgcggggctggggtggagctccttcctcttctccggggaccccttgtccctcccctcccctcccctcccctcccctcccctcccctccccttccctccccttcccttccctccccttcccttcccctagaaggaccagcacagcctcctacagctcccgcccggggtgctcctcccttgaattcagtccaggaggaagtctctgccctcttctgcccaggccaagcccctcgtcctgtgtggacgccactccctcctggagctggtgacagctgcttacagcttagctgtcttccccaccaagtcctctgagaaggtggcaaccagttgtgtcccctgtaggccaggcctttttgtacacccctattcaatgtggctgtttccttctaaggccaaggaaacgtagtcgctttctaaaccaaggagtctgaagccgtggagcctctgctctcctgaggtgatagaaccattccctgacccgggtggggctagtgagtttcttgagtaaactacccacgcaccattctttttgttttgtttttgttcttctagaggtaggatcttgctatgttgcccaggctggtctcaaactcctgggctcaagcaattctctcacctcagcctcccaagtagctgggactacaggcgtgcaccccccccgcctccacccagctaattttattttatttttatagagctggggtcttgctatgttgcccaagctggtcttgaactcctggtctcaagcaatcctcctacttcagcatcccaaagtgctgggattacagatgttagccaccatgccctgccccaacattcttttatggccctggggatcacttcagctcaaaccccttgctcaggaagatgtggctcagagttggacttcttggacccagaagcaagtgcttttgacgctgcacacaaagactttctgaaattaatttagaaaagctgtatgccaggtgtggtggcccacgcctttaatcccagcgctttggaaggctgaggtgcgttgatcacttgaggttaggagtttgagaccaccctggtcaacgtggtgaaaccccatctctactgaaaaaaaaaaccaaaaattatctgggcatggtggcagcctcctgtaatcccagctactcgggaggttgaggcaggagaatctcttgaacccggaaggcaggggttgcagtgagctgagatcgctccactgcactctaacctaggcaacagagcgagactccaccccaaaaagaaagaaagaaaaactctgaactctgggaacaactctgggatgaggttactttggaatgcagtcgcaggttccctctacatgtagcctttgcttctgccttccccactacatcttggagaaggttactcctcccacacttcctgggaccacctgagtaccattcctggacctcttccccatagagaattctgacttccaaccctctttgtagggatattataccctgcctgctctgccctgctcttttctggctgtggtgggctcagtctgcataccactagggacaatgaggagccaggcttgttggggaggggtctccttctcccactcctcccgccgtggacctcacctgaccctctctcctcttgcagcacagagttgatgagacgcgtccgtcgcttccagattgctcagtacaagtgcctggtgatcaagtatgccaaagacactcgctacagcagcagcttctgcacacatgaccggtcagtccctgccccctgcagtcctgtccagtggaaaatcacaaggcacaggacacactgttaggactctctttaatggggatggttaatcatttgaacattgaatgattcaaatcagcacactttccaaggtgcttggcaaggtagcgcacactctccactccctgggctggagccagtggttctccactgagggtgattttgccgccagggtccatttgacaatgtttgaagacatttctagttgttgcaactggaggggggaggggatgcttttgggctttaatgtgtagaaatcagggacactgctgctaagggtcctatggtgcagaggacggcccccatgcaagaacgagctggccccaaatgtcaggagcctgccagtgttcagaaactctgccgtagggtttcagcttcacacaggctgcagactggtttggtttggcctgcacgttgatttttgtttaattttttagttgtccgttgttggctggctcccccgtcacctggcagccttcacgcttccctgttttatgtgtagctgtttgagctcgctggacatttccgcctgcaacctcagtttgggagttaaattcacttccttggcagcagatgtgggcccgatgtttctgagcctgagacgctttgcttggtcctctggacttgtccacctgggcacccagtggcaaagccatgctgtgccacacattatagggcttcagcctcagagccctggctgggagctgtatccgagagttgctatggctgtgcagagaacagatccacccggcgtgtggccttcggtgggagctgaggggctcctgaagccagatgctggtggagtggagggtgcttggggcttggagttgcatgtgggaatttaaccgcaccttcgtgaccatgctgtctgatgtaggtcatttacttttccaaatttgcttcctcattcctaagatgcgatgtccacggcacagggtggtgttacacctggtggggacagggaaagcagaggaggtcacttcgttccagctgttggaagtacaacttctggagtcagtcagatccgggattaaatatgagttctgcccgtgtgtcacaagtcatctctaacacgggccacagaggccaaggctgggccagcagcattgatggctcgagaggctgcccttgcaggggccacagctggcctcccacctgccctcactttgtctttctctgtttagggagggaagagggaatttaaaatgcccaaaatactgtttcacacattctttccagaactcgaagtaggattatagcaaggtaataacgaaacaatagttgtaaagtatgtttttttgtttgtttgttgtttgtttttgggacagggtctctctctgtcacccaggctggagtgcagtggctcaatcatagcttactgttacgtgaccccaaacccttgggctcaagtgatcgtcccacctcagccccctgagcaggtgggactacaggcgcacaccaccacacccagttaatttttacatttttttcacacagtgtctcgctgtgttacccaggctggtctcgaactcctgagttcaagtgatcctcccgtcttggcctccccaaagattacgggcatgagctgctgtgtctggccagaatacaggattttaaaaatttatgttttgcaacataattaatataaagacaaatataacccaggcccagttctagttattcattcttctgaattttaaaaggaaacatttggctggcccctaatggtatcatgggccctggtacctgatgaagttggcctagtctgcccccagctcctgaacagtggaagagtttttagtctcattgagctttgtactggacattactaatttctaatccaaagcatcaagtgaagtggcttgtataaataactggttttcctctgggaggctaaggcgggtggatcacttaaaagttaggagtctgagaccagcctggccaacatggtgaaaccccatgtctgctaaaaatacaaaaattagctgggtgtgatggtgtgtggccagtagtcccagctactcttgtggctgaggtgggagaatcgcttgagacccttgagaattgggaggtagagattgcagggagccgagatggcgccactgcactccagcctgggtgacagagcaagactctgtttcataaaaaataaataaataactggttttctggacgagggcctttcccataggtgctaacttctcaaagcccggctgggtgaacactgagcctgctttgcaggtagcaggtggtcacgacagtgccattccctggcccctgcattgtggcttctggcctccctggccctgctcacgctctggctttctcttcccaggaacaccatggaggcgctgcccgcctgcctgctccgagacgtggcccaggaggccctgggcgtggctgtcataggcatcgacgaggggcagtttgtaagttggcttgtcttggcatcactcttcctgccttccgctgtgtcctcccgttttccctcgctgacttggaagttatctganncttttagtaaaataacaaggttaaatagctacaactagtgttggaataccctctgaaggcccctttctagtttccctgtcatagtgtcatagtcttgtaggattcgttttactttttttttttttttttttgagacggagttttgctcttgttgcccaggccggagtacgatggcacaatctcaccgcaaactttgcttcctgggttcaagcaattctctcctgtctcagcctcccgagtagctgggattacaggcatgcgccaccacgcccagctaattttatatttttagtagagatggggtttctccatgttggtcaagctggtctcaaactcccaacctcaggtgatccgccccgccttgaactcccaaagcgctgggattacaggcatgagctaccacacctggccattgtacctttttaaaaatacatatatctatttactggcaagatgcagtgactcacacctgtaatctcagcctgtgggaggccaaggtggacagatcacttgagcccaggagttggagactcacctgggcaacatagtaaaaccccatctctaccaaaaaaaaaaagaaattagccagtcatagcagcgcacacctgtggtccctgctactcaggaggctgaggcagaaggatggagcctgggaggtcgaggctgcagtgagtggtgatagcaccactgcactccagcccgggcgacaaggccagaccctgtctcaaaaaaaaaagggggaggtggggagtaatgtttggtttgcctcatggttccttttgcttgtttcttatacgtttattttcttgttgttgaagtaccttttttagtagtttttgcagccaggaggtatagatgggaagctgccagtctttgtatggaaatctttcttttgtcatctagtttaagctgggcagcaagaggtaggttgatcttgtgtgggtttgggtttttttttttttttgagacggagtcttactctgtcgcccaggctggagtgcaatggtgtgatctcggctcactgcaacctctgccacccggattcaagcgattttcccacctcgcctcccaagtaggtgggattacaggcacccaccatcatgcctggctaatttttgtagagacaagggttcaccatgttggctaggctggtcttgaactcctgacctcaggtgatccacccgccttggcttcccaaagtgttggaattacaggcatgagccgccgtgcccggccttttttatttttattttttttgagatggagtcttgctctgttgccctggctggagtggagtgacgtgatcttagctcacagcaacctccgccttttgggttcaagcagttctgcctcatccttccgggtagctgggatcacaggtgcgtgccacatgcgtamtcatttatgtatttttaatagagatggggtttcaccatgttggccagctggtctggaactcctgacctcaggtgatccgcatgcctcagctcccaaagtgctgggattacaggcgtgaaccacgcctggtcttgatcttgttgctttgaaaagtagcagcgctggtcattgtgtttttgctcagaggaaggccgccatctctctaatgttacctctggtcaggtattctatctgttctctctcagcacaatgtgtgtaggggaagctttgtttcatttatcctgctttatagctggtgtgccttttcatttctggggaaggaatgaagccattatcacttcaggtatttctctcctcatccatctctgaggtgttctgggttccatcttccagagtgtgttttgtttcagtgactatttttacatctgctgctctaattcatcatgctccgttttgtttgacaagttactgttgggttatttttaaatttatgctgttccttccattatgttcctgaaaatcttttcttagacttttccagatttttctatttcctcaggaacatattctgtggttgagtttctgggttattttctgttatcttagttttctttcctctgctttggagattttatttttgttagtttatcacaaagaatgaaactgaaactctctccaaggggtttagcagacttgacctcttaggtacttttagggttgcctcgaagtacacaatgtggtggtttgatataaacataacaggaatttatttctcgctcacagaccccctacgtggttccaggccggttgatggggaggccgcccacgaggcggcttaggtcgccctggctggctgtatacagacacggaggggaagagacgtggcggagcccctgggtgtgaggttttcatgggcctgaccagaagctgcaaacgtcacttctgctgatctttcaaagactagaacctgggcacagggccacctatacgtttagtatacttagtccagttcgttttttgtttgtttttaaaaacagtcttgctctgtggcccaggctggagtgcagtggcgcagtctcggctcactataacctccatgtcccaggttcaagtgattctcccgcctcagcctcctgagtagctgggattacaggcttctgccaccatgcccagctaaccttttgtatttttagtagagacggggtttcatcatgttgaccgggctggtctggaactcctaacctcaggtgatctgcctgcctcagcctcccaaagtgctgggattacagcgtgagccaccacgcctggccacacttagtctagttctataccctggaggaagaataaatgagtttgtttggtgagtgcttcaaggtctctacccgccctgcctcccagcacagagccaggccgctctggcctgaataccctgcccggacgtcacagggcctgtcccctcaaaaggccagtcctgccttcctggttctgttcttgcccaacattctgtatgagtcacagctgcaaattccattcccgtggggaggctgacgggtcccttcccctgtgcggggcatctgccctgtggagttgaggctgccagtgtccgctctgggttcccgaccacccggcagctggcatctcctccccgcttgggtatggccattccgtttctgaccttcagaggtgcgcccctgagcacccccatgcctctgcgtacgtggagacgtcgttgttgctgccccgtgcttgagggactcctggcgagaaagtgagcccaggctgggaatagggctgcagctgttctcttttgctcccaaactgtggcctcagaatgcatccagggattttgcatcagctttggggacatggccctctcagaacaaggaagcttcagctttggcaaggctctccctccttcagacctgccgctgtgagttgttcaatagctctgttctcctggctctgcgtaaaccttgttgacagaggctgacccagacccccgaggcagaaacctttcccttctccttcctcgacatccaaatgccctgagtcaggagccagcgtatgaagtcctgtcccctgttcagcctgtaggagggatttctcggtctacttcctccctggccagcaagtaaaacttgagttcattcagtgagtatttattacaccctacccagacatcagcattctgccctggcctctgtgtgcccttgttctcttcaagaagttccgggtcaccagcctgaccaacatggagaaactccgtctctactaaaaatacaaaaattagccgggcgtggtggcgcactgcctgtaatcccagctacttgggaggctgaggcaggagaatcgcttgaacccggtaggcgaaggttgcagtgagccaagatcgccccattgcactccaagcctgggcaacaacaagagcaaaactcagtctcaaaacaaaacaaaacaaaagaagttcagggtcttcccattgcaagcagttctagatcgaggagaggggttcctagcatgggacccagcagaaggactgtccttcgctccttcattgtctacgtggacagtggatgaagctcagccgaacctgccttgttcccgttttctgggtcagcagggaaagcctttcacagagtagccaccgtgccatcctgaggaaggccctgggtcagaagcttctgtgcttctttgtaccccgggcaagacacacaggtgctcacactgctctgtagaaactgttggcatccaagagagactcacctggaaatctctggaaaacctgaagctcctagctgggggtgctgtgcttcagatgctggtggtgggtgggcacccttgcatcaacagctgcacagtgtgtggtgggcttgcagggtcgcttggcaatagtaggagctctgatttatttttttaaactttttttctggctgggcaggtggctcacacctgtaatcccagcactttggaaggcctaggcgggcggatcacttgaggtcaggagtttgagaccagccaggccaacatggtgaaaccccatctctactaaaaatacaaaaattagccaagcgtggtggcacacacctgtaattccagctacttgggaggcagaggcacaagaattgcttgaacctgggaggcagaggttgcagtgagccaagattatgccactgcactccagcctggatgacagagcgagactctgtctcaaaaaaaatagacaaagccaggcgcagtggctcatgcctgtaatcccaacactttgggaggccgaggtgggtgaatcacgaggtcaggagatcgagaccatcctggctaacacggtgaaaccccgtctctactgaaaatacaaaaaaattagccaggcgtggtggtgggcacctgtagtctcagctactcgggaggctgaggcaggagagtggcgtgaacccaggaggcggagcttgcagtgagctgagatcacgccactgcactccagcctgggcgacagagcgagactccgtctcaaaaaaaaaaaaaaaatagacctttttgtgttttctgttctactacacaagtaatacaggttgagtattccttaacctaaatgcctgggaccagaagtgtttcggatttcaggttttcgaatatttgcatgttcataatataatgagaccttgggaatgagccccaagtgtaaacacaaaatccatttatgttttatagacatcttaggcacatagcctgagagtaattttatgtatttagtaatttgggcgtgagccacagtttttgactgtgacctgtcccatgaggtcaggtgtggaattttccacttgtggtgggcgctcaaaaagtttcagattttggagcctttcaggttagagacatgcaatctataataagtttaatctaggaaaagttagggtctggcacagaggctcacgtctgtgatcccagcactttgggaggctgaggcaggcagatcactggaagtgctggacgggtggggaagtgccgggtgcaagaaccaagctctttgactatggacctcagcctgaggttggtcaagaggtggagtgagtgggggctgaggaccttcatcctgaaaccctgatgcaggagagtctggggtctgccttctaccctcatgtggcgggtgaaggagcaaggttctcaactcaggagggttcttcccctctccattcccacccaggggacatctcacaacaactagaaacaattttgtcgcagctggggggtgggaggtgtgttcctggcatctatctaatgggtgggggcgagggacgcagcccaacaccctacagtgcacaggacacagcgagatccggcctcaaactggcagccatggcagcgtcagccctccagggggcgcgccctggcgcaggtggtgtgccggcccacagctccttgcaggctgggagctgcattttcgtgacatgtcatgagtcctcagagaaaaagagggaacgagtgcatggtggggaggggccctggcgtgctggagtctctgggtttccttctccagagacccctgcagtcagctgagcgcaatcagtcacgttgggctttgcttggatctcactggaatttttcgagccaccccttagtcctcaccttgctaagccctcacgtctcaataacctcaaacctcagtacctgggctgagaaagcctgagtggccctgggagagagaccctgcacccaaggacaaggacatccctgcttcacccaacccaaaggccagtctggacatatgaactcaaccagctaagagtgatatgattgattgatgagaatcaccagagcacttgccagagtttcagcttctccctgggccaaagtgaagtttgctttacacagtaaatgtgctctgtgcaggtcctgaatttagaaggctgtgctgtgtcatcctgctctgtaaatggccagtaggacccccgccccttctcaaggcacattacccgtttaaaacgggggaggcaagagcacaaagcgcccacctattcaccgaagagcatgtatataacttagggccttccatccttaaacaacaggaccttccttgctcttacggaaaaggaaacaggttcagagacgttaattcattgccaaggtcacacagataatgggtccagcgaagagtggtgtccgagcccaaggcagcaggcctttggccactgcagtgttaaacagcacagctggtgtggaagtccggtgctgagtcctgggtacctggactcggagggaagctggctgcagggggaaggggctgcgcagttgtggatgtacctgtcgtctgctggggggcgtgcgggtggacacagtcccccggcctggggagcctcgtgggagaattaagagttactccgggccaaatggccggagttgtcagatctggcagcgtcttcgctggggctccagggagctgctgctggggtggaagctctcacactctttctccacgtgccctttccagttccctgacatcatggagttctgcgaggccatggccaacgccgggaagaccgtaattgtggctgcactggatgggaccttccagaggaaggtaaggcgtctgatccaggtctggagctgggattgaggagggcaagaggcttctggatgggcacagagacaccagctctgggtgaccagggctcagccaccacagggttacggccgagctgctcaggcttggctgagccaagggactccatggtctgtgcagactgcgtgccatctgttgtggcaggtgctttgaattggcaaagggacagagccgggcatggtgctctgggggttgggggaaggactaaggtcagagcaaactctcctggcttcagtacttgtgaatcagagggtttaaaagaaaaacccacctggtaaggtgctgagcgccctctgtctttccatgggagcacagccatttggggccatcctgaacctggtgccgctggccgagagcgtggtgaagctgacggcggtgtgcatggagtgcttccgggaagccgcctataccaagaggctcggcacagagaaggaggtagctccacctgccttccctgcaggccggcggggtgggggtatggctctgcctccttcctgtcctggcccttcacccatcccctgtccctgcggccaggtcgaggtgattgggggagcagacaagtaccactccgtgtgtcggctctgctacttcaagaaggcctcaggccagcctgccgggccggacaacaaagagaactgcccagtgccaggaaagccaggggaagccgtggctgccaggaagctctttgccccacagcagattctgcaatgcagccctgccaactgagggacctgcaagggccgcccgctcccttcctgccactgccgcctactggacgctgccctgcatgctgcccagccactccaggaggaagtcgggaggcgtggagggtgaccacaccttggccttctgggaactctcctttgtgtggctgccccacctgccgcatgctccctcctctcctacccactggtctgcttaaagcttccctctcagctgctgggacgatcgcccaggctggagctggccccgcttggtggcctgggatctggcacactccctctccttggggtgagggacagagccccacgctgttgacatcagcctgcttcttcccctctgcggctttcactgctgagtttctgttctccctgggaagcctgtgccagcacctttgagccttggcccacactgaggcttaggcctctctgcctgggatgggctcccaccctcccctgaggatggcctggattcacgccctcttgtttccttttgggctcaaagcccttcctacctctggtgatggtttccacaggaacaacagcatctttcaccaagatgggtggcaccaaccttgctgggacttggatcccaggggcttatctcttcaagtgtggagagggcagggtccacgcctctgctgtagcttatgaaattaactaattgaaaattcactggttggtggacgcacatttctctttcacctgggtttccctgggtctcatggacagctccaacttgatttggg

SEQ ID NO: 56 - DNA, 2974 bp, Homo sapiens
ctcagggcagagggaggaaggacagcagaccagacagtcacagcagccttgacaaaacgttcctggaactcaagctcttctccacagaggaggacagagcagacagcagagaccatggagtctccctcggcccctccccacagatggtgcatcccctggcagaggctcctgctcacagcctcacttctaaccttctggaacccgcccaccactgccaagctcactattgaatccacgccgttcaatgtcgcagaggggaaggaggtgcttctacttgtccacaatctgccccagcatctttttggctacagctggtacaaaggtgaaagagtggatggcaaccgtcaaattataggatatgtaataggaactcaacaagctaccccagggcccgcatacagtggtcgagagataatataccccaatgcatccctgctgatccagaacatcatccagaatgacacaggattctacaccctacacgtcataaagtcagatcttgtgaatgaagaagcaactggccagttccgggtatacccggagctgcccaagccctccatctccagcaacaactccaaacccgtggaggacaaggatgctgtggccttcacctgtgaacctgagactcaggacgcaacctacctgtggtgggtaaacaatcagagcctcccggtcagtcccaggctgcagctgtccaatggcaacaggaccctcactctattcaatgtcacaagaaatgacacagcaagctacaaatgtgaaacccagaacccagtgagtgccaggcgcagtgattcagtcatcctgaatgtcctctatggcccggatgcccccaccatttcccctctaaacacatcttacagatcaggggaaaatctgaacctctcctgccacgcagcctctaacccacctgcacagtactcttggtttgtcaatgggactttccagcaatccacccaagagctctttatccccaacatcactgtgaataatagtggatcctatacgtgccaagcccataactcagacactggcctcaataggaccacagtcacgacgatcacagtctatgcagagccacccaaacccttcatcaccagcaacaactccaaccccgtggaggatgaggatgctgtagccttaacctgtgaacctgagattcagaacacaacctacctgtggtgggtaaataatcagagcctcccggtcagtcccaggctgcagctgtccaatgacaacaggaccctcactctactcagtgtcacaaggaatgatgtaggaccctatgagtgtggaatccagaacgaattaagtgttgaccacagcgacccagtcatcctgaatgtcctctatggcccagacgaccccaccatttccccctcatacacctattaccgtccaggggtgaacctcagcctctcctgccatgcagcctctaacccacctgcacagtattcttggctgattgatgggaacatccagcaacacacacaagagctctttatctccaacatcactgagaagaacagcggactctatacctgccaggccaataactcagccagtggccacagcaggactacagtcaagacaatcacagtctctgcggagctgcccaagccctccatctccagcaacaactccaaacccgtggaggacaaggatgctgtggccttcacctgtgaacctgaggctcagaacacaacctacctgtggtgggtaaatggtcagagcctcccagtcagtcccaggctgcagctgtccaatggcaacaggaccctcactctattcaatgtcacaagaaatgacgcaagagcctatgtatgtggaatccagaactcagtgagtgcaaaccgcagtgacccagtcaccctggatgtcctctatgggccggacacccccatcatttcccccccagactcgtcttacctttcgggagcgaacctcaacctctcctgccactcggcctctaacccatccccgcagtattcttggcgtatcaatgggataccgcagcaacacacacaagttctctttatcgccaaaatcacgccaaataataacgggacctatgcctgttttgtctctaacttggctactggccgcaataattccatagtcaagagcatcacagtctctgcatctggaacttctcctggtctctcagctggggccactgtcggcatcatgattggagtgctggttggggttgctctgatatagcagccctggtgtagtttcttcatttcaggaagactgacagttgttttgcttcttccttaaagcatttgcaacagctacagtctaaaattgcttctttaccaaggatatttacagaaaagactctgaccagagatcgagaccatcctagccaacatcgtgaaaccccatctctactaaaaatacaaaaatgagctgggcttggtggcgcgcacctgtagtcccagttactcgggaggctgaggcaggagaatcgcttgaacccgggaggtggagattgcagtgagcccagatcgcaccactgcactccagtctggcaacagagcaagactccatctcaaaaagaaaagaaaagaagactctgacctgtactcttgaatacaagtttctgataccactgcactgtctgagaatttccaaaactttaatgaactaactgacagcttcatgaaactgtccaccaagatcaagcagagaaaataattaatttcatgggactaaatgaactaatgaggattgctgattctttaaatgtcttgtttcccagatttcaggaaactttttttcttttaagctatccactcttacagcaatttgataaaatatacttttgtgaacaaaaattgagacatttacattttctccctatgtggtcgctccagacttgggaaactattcatgaatatttatattgtatggtaatatagttattgcacaagttcaataaaaatctgctctttgtataacagaaaaa

SEQ ID NO: 57 - DNA, 2218 bp, Homo sapiens
cttctctctccattcagtgcacgcgttactttggctaaaaggaggtgagcggcactctgcccttccagagcaagcatggagcaacaggatcagagcatgaaggaagggaggctgacgcttgtgcttgccctggcaaccctgatagctgcctttgggtcatccttccagtatgggtacaacgtggctgctgtcaactccccagcactgctcatgcaacaattttacaatgagacttactatggtaggaccggtgaattcatggaagacttccccttgacgttgctgtggtctgtaaccgtgtccatgtttccatttggagggtttatcggatccctcctggtcggccccttggtgaataaatttggcagaaaaggggccttgctgttcaacaacatattttctatcgtgcctgcgatcttaatgggatgcagcagagtcgccacatcatttgagcttatcattatttccagacttttggtgggaatatgtgcaggtgtatcttccaacgtggtccccatgtacttaggggagctggcccctaaaaacctgcggggggctctcggggtggtgccccagctcttcatcactgttggcatccttgtggcccagatctttggtcttcggaatctccttgcaaacgtagatggctggccgatcctgctggggctgaccggggtccccgcggcgctgcagctccttctgctgcccttcttccccgagagccccaggtacctgctgattcagaagaaagacgaagcggccgccaagaaagccctacagacgctgcgcggctgggactctgtggacagggaggtggccgagatccggcaggaggatgaggcagagaaggccgcgggcttcatctccgtgctgaagctgttccggatgcgctcgctgcgctggcagctgctgtccatcatcgtcctcatgggcggccagcagctgtcgggcgtcaacgctatctactactacgcggaccagatctacctgagcgccggcgtgccggaggagcacgtgcagtacgtgacggccggcaccggggccgtgaacgtggtcatgaccttctgcgccgtgttcgtggtggagctcctgggtcggaggctgctgctgctgctgggcttctccatctgcctcatagcctgctgcgtgctcactgcagctctggcactgcaggacacagtgtcctggatgccatacatcagcatcgtctgtgtcatctcctacgtcataggacatgccctcgggcccagtcccatacccgcgctgctcatcactgagatcttcctgcagtcctctcggccatctgccttcatggtggggggcagtgtgcactggctctccaacttcaccgtgggcttgatcttcccgttcatccaggagggcctcggcccgtacagcttcattgtcttcgccgtgatctgcctcctcaccaccatctacatcttcttgattgtcccggagaccaaggccaagacgttcatagagatcaaccagattttcaccaagatgaataaggtgtctgaagtgtacccggaaaaggaggaactgaaagagcttccacctgtcacttcggaacagtgactctggagaggaagccagtggagctggtctgccaggggcttcccactttggcttatttttctgacttctagctgtctgtgaatatccagaaataaaacaactctgatgtggaatgcagtcctcatctccagcctccccaccccagtgggaactgtgcaaagggctgccttgctgttcttgaagctgggctgtctctctccatgttggcctgtcaccagacccgagtcaattaaacagctggtcctccactttgctggttcagccttcgtgtggctcctggtaacgtggctccaccttgatgggtcaacctttgtgtggctcctggtaacataacaacaacagttactatagtggtgagatggaaggaatcaaattttgccagagaaactaactcggtggccccaacaggtcttccggggccatgggcatttgtttagagccaaattcatcctcttaccagatccttttccagaaatacctgtctaggaaggtgtgatgtcagaaacaatgacatccagaaagctgaggaacaggttcctgtggagacactgagtcagaattcttcatccaaattattttgttagtggaaaatggaattgcttctgtgtagtcaataaaatgaacctgatcacttttc

SEQ ID NO: 58 - DNA, 871 bp, Homo sapiens
gctgtcagaaaacaataacagcagtgagaatgaacgcacttaaataaaagctcgtgtctagagtctctccttttataggcctttcatgcaaataaagaattcaaaatatccagctctgattgggcaatgtgttagtgacgcatacatgtaaaatagccttcaccttatttcctttctaattggttggctcgtcaaagaacaattttaaccaatcaaattgcgcctttcacaattctaccgatgactataactagcttcttattcctccatcgagcccattctttttctttattcagtggattgttagttcttctgctgttaggaagccactatgtctggacgtggaaagcaaggcggcaaagctcgggcaaaagctaaaacgcgttcttccagggccggtcttcagtttccagttggccgtgtgcaccgcctcctccgcaaaggcaactactccgaacgagtcggggccggcgctccagtgtacctggcagcggtgctggaatatctgacggccgagatcttagagctagctggcaacgcggctcgcgacaataagaagacccgcatcatcccgcgccacctgcagctagccatccgcaacgacgaggagctaaataagcttctaggtcgcgtgaccatcgcgcagggcggtgtcctgcccaacatccaggccgtattgctgcctaagaagacggagagccaccataaggccaagggcaagtgaaatgattactagtcaaatccgtcagtgatcccgagtcccagaaaccaaaggctcttttcagagccacccaccttttctgtaaagtgctggaatacacatacgatgcctgaaatctcaatgttcactgtcctaatttttaacgaactt

SEQ ID NO: 59 - DNA, 451 bp, Homo sapiens
tgtgctcactgaggatctgaggggaccctgttaggagagcatagcatcatgatgtattagctgttcatctgctactggttggatggacataactattgtaactattcagtatttactggtaggcactgtcctctgattaaacttggcctactggaatggctacttaggattgatctaagggccaaagtgcagggtgggtgaactttattgtactttggatttggttaacctgttttcttcaagcctgaggttttatatacaaactccctgaatactctttttgccttgtatcttctcagcctcctagccaagtcctatgtaatatggaaaacaaacactgcagacttgagattcagttgccgatcaaggctctggcattcagagaacccttgcaactcgagaagctgtttttatttccgtttttgttttgatcccagtgctctcccatctt

SEQ ID NO: 60 - DNA, 354 bp, Homo sapiens
  misc_feature: n=a,t,g or c
tttttggccttcaggtttccatttaatggccaagccagcactgccaagatgtcctcctgcctgagaagcccacccacgctggcacccctcagcctcactagcggcatcccagtccagtcctggtgtggggcctcatctcagctccttcagcaagctgttgacagagcccagcagctcctggaagtagccctcgtcctcaccatcctgcagctccaggctggccagcacctggtactcagcctgcaggtggccagtgtcctgccgagctgggggtcctgacggtagcggtcccggcagtggtcaggaggacgcccagtgtctgcagcaccttctnacgggcatcatgctcgcttg

SEQ ID NO: 61 - DNA, 444 bp, Homo sapiens
ttaacatgcacaacctgccacttttaatcagaagtccatgtatgaaatccaggctggttttggatgttaacatggagcgaatgggatacatcaaagaatggttggctgcttgttttaaagaggtcccactggtgacaggatggtagtggcgatggcagtgaggacagactggtaaagggaaaacccagaggcttgtggggagaaagggcttttgtagttaggaagagacagaggtaggcccctcagccagctccagcaggatagagacaacaacatacagcgcacagagaattcgtgcctcagggtcatagtccatgtcaggaggactgctggccagctcatcccagttctgctccatgacagatttcacctggtccttcaacagaggaagggtccccttctccaggggcctcagccacaaactgctgctcttcagacagctct

SEQ ID NO: 62 - DNA, 481 bp, Homo sapiens
  misc_feature: n=a,t,g or c
cacaagaattatgtctttattggttcatcttagaattaaatcaacatggaatatgtactttttgaattaaacaaaatgttttgataaaaatgagatacgtgtgtataaaagctggaaaactcatgtcccctgaaacttggtttccaccagatgagtttcaaattcagatactaaacacacatgaagaaataatcaaatgaattctattcatcctttccccaaagttttgcttacaattaagatataggtattatttgtatgccgaacaaacaaaataaattggaagatgtttggataaacagggaagtgaacacttcaggaactactatttgcagtttgcaggacaggataatcttctctaggaagaataatgtcaacatagcagcactatattcaccaggattccccagagccgatggtccgatcatgtgggcaggaagccaaaccttctgggctgctccacaatatccatcagcttncc

SEQ ID NO: 63 - DNA, 424 bp, Homo sapiens
taaagactgaattctttatttggaatgaaatattcttgtcttacacagtagataataaaaaggaataacgtatacacattattaatcataaatgaaaagagaaaaccagtgcaaaatgcggcagacagtacatctctaacatattgcaaaggctgataccgggacaacactacttcagaaaggtgccagcaaaatggtgaatgtgtgaaaacaaagaaaaatattgtgtttatagggtgcagaaagtttcccagaaactgacagagcccatgcatctctgcacccagaatacacttagagaataattttaaccatgacaataggggactacagaaaatggtatattgtgtataaacctggcctctctaatcgcctccttatgtgcctggaacatcttgacgttgttcatgttcgactggccaat

SEQ ID NO: 64 - DNA, 427 bp, Homo sapiens
gacatcctttgtatgtttactataataacagcaaaatttttccaaaccagagccaatttccttggctctaggtacaccccttccaagcaatgcaaaggacatctccaatcatgacatttaagacaattctttatttctctgacagtgacttcttgaagtgcacatataataaataaatagaaaatatatctttgttcatggtgatgcctacaagaaatgtttacatacaaacactctgtacatctaactcccgaaaaaggaccagctatttcggcaacagaaaaaagacaagcatttcagaggagcgttgcttttccttaaagacctaactcacttaagtctttaccaaacagaaataacaagggaggacaattttctaagcaataagaaaatttgtggctaccaaggaaaatgcctagatattggg

SEQ ID NO: 65 - DNA, 420 bp, Homo sapiens
  misc_feature: n=a,t,g or c
gtcataaagattgagtttatttttatcctcaattttaataaattctgttctgggttttagttcagattatgagtatatattatcataaatggtttgaatatttaccaacacagaatttagtaacaagtgagatagatgctaagacactgttaaggtaggttggaagcacttagttttgataggcatgatatatagctagggaagcaagtgtatgcaaataattatgctgtctttgaaagagtggcttatttagatgtagcatagccaatgagactgtgggtagtacttgtgaaacttacaggaaggtaattaaagacggcacagattctcttcttttactgggctgtttctggcattacataggggattatggaaggggagacaagaggattgacnggggagccnggaacngcccgtcac

SEQ ID NO: 66 - DNA, 437 bp, Homo sapiens
  misc_feature: n=a,t,g or c
aagtttaaaaattaagaacaaatactttgatagatttcttttataactccttaatccatctagtagtttgcaagtcatgaactgacaatcttcgttcacctcaagtaattagatcttgtggtaccatttatatttcctttttataactatagataacaaattatataaagntgtgaacattcttcccttatcacctccccctctcccaccccaatcctagggngtatcctgaggtgaggcatgtatgccttcaaatcttttcatgtacattcacataaaatgtaactttaaaggnctcaatgtggtatattatacacatggggtatgtggaatatatnggcatggcatttatttaatttggttttggnccaggggggggggtcccntacctgctttgggaccctggcctttggntcaccttcnctagggggttcttt

SEQ ID NO: 67 - DNA, 441 bp, Homo sapiens
ttttttttgttttctacagcaccaaagaaattcaaataggaaaaggagagttgagaattgggaatcaagaatcagccctgtttccatcttagccacaccaacttatatctttatgattttcaaagcttttgccatgtgattctgcccccacaaaggcatcggtatttcctaaatggtacctgtatatgcagcgttgttttctataccatccttattcaaaacttgcatgtggcacaaaatgggttggtgggcaccaaggtatattttctgttgatttgatatgttctttgtcttaatcttaggccaaggaaaacaaacagggaccaacttcaaatccgaacttctggattctgatcaccaaaggtcattgatccatggacatcaacataggggacttggatcaatttttgggggtattggatttccatggacagttttttt

SEQ ID NO: 68 - DNA, 341 bp, Homo sapiens
  misc_feature: n=a,t,g or c
gcagttgggaagaatttattatcactaagtggccctgacagatcagggaggagggggtgacactaacgaggctgctacaatcagctcccctagaggcagcgattaagggctcattacccgctggggtgaggggagcctgggaaaggcagcggggcgnggggattaggttaggaggtggggcantttagagggaagaagagtgggacacccccaggggagtccaaggaggcctggcctggnagaagantnagnttaccctcccaccccccantggggannntatgactaaggaagcccccagaagggntgaaaggagantttcccagggaantgagnttaga

SEQ ID NO: 69 - DNA, 328 bp, Homo sapiens
  misc_feature: n=a,t,g or c
tgagccaaaatatatatacttaattttagttatgccagaagtaagtataatttctcagtccaaggatgttaggaagcaacttacagagcatgcttcaaataganttctcttggcctttgaaggtaactattttcaaacttaatagtagagtcaagcaagantggacaattagagtttncaaanttgaaaantattatgtattttatataatcattacctatggtttacagattttatttttatgatacatatctctaaggtaggtgggtacactgaggacataggcaantatgccaataaatacttatttaagctggaagtganctaa

SEQ ID NO: 70 - DNA, 203 bp, Homo sapiens
cttgtctttgagttttattaggaaggggagtccgtcgtggtgtgagacgttagaccggaaggctgggcttgctaaataaaatccgcggtctggcacctctggagagggcagagcctcctcagaagagctggcctgaggaagaagccctttgccccctccccttctataagttagtgtcatttggctctgggaacgctggggcc

SEQ ID NO: 71 - DNA, 299 bp, Homo sapiens
  misc_feature: n=a,t,g or c
tttccaggttgacaggttttattccacccccttccatccccatggccaccccaggcaggaggagacaggtgtgctggagtctggtcactttggggcccggcgtgggcagagcccactgggtttacattctctgtgggcaggtgtggacaccagagggctggggcaggaggagcgtgggagcgagcggncgacccccgtctctggcccggcccctgggtaaacgccgactcagatgcctgaaacagacctgggccgagcaaggaaggttgatggtatttccacccagacagaaattcaaa

SEQ ID NO: 72 - DNA, 216 bp, Homo sapiens
ggaaaacaaaagaaccagccattttattccaagacctatgttctggggcagcaggaataaataaggaagggaggggacgggggcagggaggtaggttctacgtcttgcagcacatcccacactttgatcgatgacagcagccgcagcagaaaatgcagatggggaagtgggtgtctcgcctccttcgcctctggaacatgggcatccagctggccc

SEQ ID NO: 73 - DNA, 364 bp, Homo sapiens
  misc_feature: n=a,t,g or c
ttgtactttcatttagaagnatgaatcatgagcaagtagtcatgcaggaaattgtatcctctgcccacccacccacagaaagggccagtgctggaatggacagaatacagcaggaagtgcatgaaggtggaaaaggggagggagctgggagcttatctccgagagcgtttgggaggataggcgcgtggagtctgttagctggaggcttctacattcctggggcctccagaacccaaacgcctgccagctgccctgcccagtgaaacccaaaccaggttgcctttttgaacttttccacttgagggccacctttgggagtcagagccagcgagctcagggtctctcctgggggaaccctttcaaa

SEQ ID NO: 74 - DNA, 3127 bp, Homo sapiens
gtttgcatagctccctggacttctgctttgcactgccctgcaggagtgggtggggaaaggaagtggctttgaggcacacagaggggcttgttgaggccaccggaggaagcttctgccaccaatatgggacctgtgcccagcctaccagaagagagcatctgaaaacatgtatcgacatggtaacccctctgcttgaagcctcacatggctccctattgccttggtgctgaacaccctatggctgaccgtggcccagcctctgcaacagctctgcctcctctccagtggtgaagacccagcctgctgagactcctcctgcagttcctcaacatgcctgcatttctgctgccgtcagggcctttgcgaaggttgttccttgtaactggaatgcccttccatccctttttttattcaaaaggctgcaattttaattgaagaaagttcccttccaaggttcatgagttgcctgacttgcccaccggtttcctgcaagatcccttggcctggcacttagtgctcaggaaatatttggtgatgggccaactgagtgagaaggtgggatctggtgggaaggaaaggcggaaggtagaaattctgctcacttcctcattcccacctcccaaggaacccctggtgtccctgtggaacccgctttgggaaccggtggttcaggtcagccttttcactttgtactcaaagccacatcgcattgaagccacaggtggggcaaggtcatgcatgactgagtctccaaatcccttcaccctgtttggttctgcaacggggattaggggagccccacgatttgttttcaaaggatgtccgggctccaggacaggatgccctgggtcacctgatgacaggtgtggtggttggaaagggccgggtttcagctccgggtacacttcctccttccttctgctgcgtggtgtggcctcttccacgtcctcagaatccagctgttactcgtccgcggcctctcagctctagggccctctgcacactggcccccccagtgtcacgggcatccagacgggatccagtgcatcctcttttagaagaaaggcctgtctccaggtccccgagtccctctagcatctcccagaaggtgtcaagacgcagcagtgtccaggagcggcagagactctgacccatggatcccctgggcccggccaagccacagtggtcgtggcgctgctgtctgaccacgctgctgtttcagctgctgatggctgtgtgtttcttctcctatctgcgtgtgtctcaagacgatcccactgtgtaccctaatgggtcccgcttcccagacagcacagggacccccgcccactccatccccctgatcctgctgtggacgtggccttttaacaaacccatagctctgccccgctgctcagagatggtgcctggcacggctgactgcaacatcactgccgaccgcaaggtgtatccacaggcagacgcggtcatcgtgcaccaccgagaggtcatgtacaaccccagtgcccagctcccacgctccccgaggcggcaggggcagcgatggatctggttcagcatggagtccccaagccactgctggcagctgaaagccatggacggatacttcaatctcaccatgtcctaccgcagcgactccgacatcttcacgccctacggctggctggagccgtggtccggccagcctgcccacccaccgctcaacctctcggccaagaccgagctggtggcctgggcagtgtccaactgggggccaaactccgccagggtgcgctactaccagagcctgcaggcccatctcaaggtggacgtgtacggacgctcccacaagcccctgccccagggaaccatgatggagacgctgtcccggtacaagttctatctggccttcgagaactccttgcaccccgactacatcaccgagaagctgtggaggaacgccctggaggcctgggccgtgcccgtggtgctgggccccagcagaagcaactacgagaggttcctgccacccgacgccttcatccacgtggacgacttccagagccccaaggacctggcccggtacctgcaggagctggacaaggaccacgcccgctacctgagctactttcgctggcgggagacgctgcggcctcgctccttcagctgggcactcgctttctgcaaggcctgctggaaactgcaggaggaatccaggtaccagacacgcggcatagcggcttggttcacctgagaggctggtgtggggcctgggctgccaggaacctcattttcctggggcctcacctgagtgggggcctcatctacctaaggactcgtttgcctgaagcttcacctgcctgaggactcacctgcctgggacggtcacctgttgcagcttcacctgcctggggattcacctacctgggtcctcactttcctggggcctcacctgctggagtcttcggtggccaggtatgtcccttacctgggatttcacatgctggcttccaggagcgtcccctgcggaagcctggcctgctggggatgtctcctggggactttgcctactggggacctcggctgttggggactttacctgctgggacctgctcccagagaccttccacactgaatctcacctgctaggagcctcacctgctggggacctcaccctggaggcactgggccctgggaactggcacccatgggcccacccatgagtgatggttctggctgatttgtttgtgatgttgttagccgcctgtgaggggtgcagagagataatcaccgcaccgtttccagatgtaatactgcaaagaaaaccaatgatgaggccgggtgcggtggctcacacctgtaatcccagcactttgggaggccgaggcaggcggatcacaaggtcaggagatcgagaccatcctggccaatatggtgaaacccgtctctattaaaaaatacaaaaattagtggggcgtggtctcaggctcctgcagtcccagctacttgggaggctgaggcaggagaatggtgtgaacctgtgaggtggagcttgcagtgagccaagatcgcgccattgcactccaacctggacgacagagcaagactccatctcaaaaaaataaaataaaggccatatgtttaatca

SEQ ID NO: 75 - DNA, 1362 bp, Homo sapiens
agcaactccaaggacacagttcacagaaatttggttctcagccccaaaatactgattgaattggagacaattacaaggactctctggccaaaaacccttgaagaggccccgtgaaggaggcagtgaggagcttttgattgctgacctgtgtcgtaccaccccagaatgtgcactgggggctgtgccagatgcctgggggggaccctcattccccttgctttttttggcttcctggctaacatcctgttattttttcctggaggaaaagtgatagatgacaacgaccacctttcccaagagatctggtttttcggaggaatattaggaagcggtgtcttgatgatcttccctgcgctggtgttcttgggcctgaagaacaatgactgctgtgggtgctgcggcaacgagggctgtgggaagcgatttgcgatgttcacctccacgatatttgctgtggttggattcttgggagctggatactcgtttatcatctcagccatttcaatcaacaagggtcctaaatgcctcatggccaatagtacatggggctaccccttccacgacggggattatctcaatgatgaggccttatggaacaagtgccgagagcctctcaatgtggttccctggaatctgaccctcttctccatcctgctggtcgtaggaggaatccagatggttctctgcgccatccaggtggtcaatggcctcctggggaccctctgtggggactgccagtgttgtggctgctgtgggggagatggacccgtttaaacctccgagatgagctgctcagactctacagcatgacgactacaatttcttttcataaaacttcttctcttcttggaattattaattcctatctgcttcctagctgataaagcttagaaaaggcagttattccttctttccaaccagctttgctcgagttagaattttgttattttcaaataaaaaatagtttggccacttaacaaatttgatttataaatctttcaaattagttcctttttagaatttaccaacaggttcaaagcatacttttcatgatttttttattacaaatgtaaaatgtataaagtcacatgtactgccatactacttctttgtatataaagatgtttatatctttggaagttttacataaatcaaaggaagaaagcacatttaaaatgagaaactaagaccaatttctgtttttaagaggaaaaagaatgattgatgtatcctaagtattgttatttgttgtctttttttgctgccttgcttgagttgcttgtgactgatcttttgaggctgtcatcatggctagggttcttttatgtatgttaaattaaaacctgaattcagaggtaacgt

SEQ ID NO: 76 - DNA, 2516 bp, Homo sapiens
aattcgggccgaaaagaagacagccttgggtcgcgattgtggggcttcgaagagtccagcagtgggaatttctagaatttggaatcgagtgcattttctgacatttgagtacagtacccaggggttcttggagaagaacctggtcccagaggagcttgactgaccataaaaatgagtactgcagatgcacttgatgatgaaaacacatttaaaatattagttgcaacagatattcatcttggatttatggagaaagatgcagccagaggaaatgatacgtttgtaacactcgatgaaattttaagacttgcccaggaaaatgaagtggattttattttgttaggtggtgatctttttcatgaaaataagccctcaaggaaaacattacatacctgcctcgagttattaagaaaatattgtatgggtgatcggcctgtccagtttgaaattctcagtgatcagtcagtcaactttggttttagtaagtttccatgggtgaactatcaagatggcaacctcaacatttcaattccagtgtttagtattcatggcaatcatgacgatcccacaggggcagatgcactttgtgccttggacattttaagttgtgctggatttgtaaatcactttggacgttcaatgtctgtggagaagatagacattagtccggttttgcttcaaaaaggaagcacaaagattgcgctatatggtttaggatccattccagatgaaaggctctatcgaatgtttgtcaataaaaaagtaacaatgttgagaccaaaggaagatgagaactcttggtttaacttatttgtgattcatcagaacaggagtaaacatggaagtactaacttcattccagaacaatttttggatgacttcattgatcttgttatctggggccatgaacatgagtgtaaaatagctccaaccaaaaatgaacaacagctgttttatatctcacaacctggaagctcagtggttacttctctttccccaggagaagctgtaaagaaacatgttggtttgctgcgtattaaagggaggaagatgaatatgcataaaattcctcttcacacagtgcggcagtttttcatggaggatattgttctagctaatcatccagacatttttaacccagataatcctaaagtaacccaagccatacaaagcttctgtttggagaagattgaagaaatgcttgaaaatgctgaacgggaacgtctgggtaattctcaccagccagagaagcctcttgtacgactgcgagtggactatagtggaggttttgaacctttcagtgttcttcgctttagccagaaatttgtggatcgggtagctaatccaaaagacattatccattttttcaggcatagagaacaaaaggaaaaaacaggagaagagatcaactttgggaaacttatcacaaagccttcagaaggaacaactttaagggtagaagatcttgtaaaacagtactttcaaaccgcagagaagaatgtgcagctctcactgctaacagaaagagggatgggtgaagcagtacaagaatttgtggacaaggaggagaaagatgccattgaggaattagtgaaataccagttggaaaaaacacagcgatttcttaaagaacgtcatattgatgccctcgaagacaaaatcgatgaggaggtacgtcgtttcagagaaaccagacaaaaaaatactaatgaagaagatgatgaagtccgtgaggctatgaccagggccagagcactcagatctcagtcagaggagtctgcttctgcctttagtgctgatgaccttatgagtatagatttagcagaacagatggctaatgactctgatgatagcatctcagcagcaaccaacaaaggaagaggccgaggaagaggtcgaagaggtggaagagggcagaattcagcatcgagaggagggtctcaaagaggaagagcctttaaatctacaagacagcagccttcccgaaatgtcactactaagaattattcagaggtgattgaggtagatgaatcagatgtggaagaagacatttttcctaccacttcaaagacagatcaaaggtggtccagcacatcatccagcaaaatcatgtcccagagtcaagtatcgaaaggggttgattttgaatcaagtgaggatgatgatgatgatccttttatgaacactagttctttaagaagaaatagaagataatatatttactggcactgagaaacatgcaagatacaggaaaaatgaaaatgttacaagctaagagtttacagtttaagattttaagtattgtttcctgagcataactccataagtaagaaatttctagttcacagacatacaatagcattgattcaccttgtttttttaacctggttgttgtagtaagagctttgtttcaatatcactcttgagtaaagattaaaataaagctaccattttacatttctaaaaaaaaaaaaaaaaaaaaaaaaaaaaaaaaaaaaaaaaaaaaaaaaaaaaaa

SEQ ID NO: 77 - DNA, 2740 bp, Homo sapiens
gcgaaattgaggtttcttggtattgcgcgtttctcttccttgctgactctccgaatggccatggactcgtcgcttcaggcccgcctgtttcccggtctcgctatcaagatccaacgcagtaatggtttaattcacagtgccaatgtaaggactgtgaacttggagaaatcctgtgtttcagtggaatgggcagaaggaggtgccacaaagggcaaagagattgattttgatgatgtggctgcaataaacccagaactcttacagcttcttcccttacatccgaaggacaatctgcccttgcaggaaaatgtaacaatccagaaacaaaaacggagatccgtcaactccaaaattcctgctccaaaagaaagtcttcgaagccgctccactcgcatgtccactgtctcagagcttcgcatcacggctcaggagaatgacatggaggtggagctgcctgcagctgcaaactcccgcaagcagttttcagttcctcctgcccccactaggccttcctgccctgcagtggctgaaataccattgaggatggtcagcgaggagatggaagagcaagtccattccatccgtggcagctcttctgcaaaccctgtgaactcagttcggaggaaatcatgtcttgtgaaggaagtggaaaaaatgaagaacaagcgagaagagaagaaggcccagaactctgaaatgagaatgaagagagctcaggagtatgacagtagttttccaaactgggaatttgcccgaatgattaaagaatttcgggctactttggaatgtcatccacttactatgactgatcctatcgaagagcacagaatatgtgtctgtgttaggaaacgcccactgaataagcaagaattggccaagaaagaaattgatgtgatttccattcctagcaagtgtctcctcttggtacatgaacccaagttgaaagtggacttaacaaagtatctggagaaccaagcattctgctttgactttgcatttgatgaaacagcttcgaatgaagttgtctacaggttcacagcaaggccactggtacagacaatctttgaaggtggaaaagcaacttgttttgcatatggccagacaggaagtggcaagacacatactatgggcggagacctctctgggaaagcccagaatgcatccaaagggatctatgccatggcctcccgggacgtcttcctcctgaagaatcaaccctgctaccggaagttgggcctggaagtctatgtgacattcttcgagatctacaatgggaagctgtttgacctgctcaacaagaaggccaagctgcgcgtgctggaggacggcaagcaacaggtgcaagtggtggggctgcaggagcatctggttaactctgctgatgatgtcatcaagatgctcgacatgggcagcgcctgcagaacctctgggcagacatttgccaactccaattcctcccgctcccacgcgtgcttccaaattattcttcgagctaaagggagaatgcatggcaagttctctttggtagatctggcagggaatgagcgaggcgcagacacttccagtgctgaccggcagacccgcatggagggcgcagaaatcaacaagagtctcttagccctgaaggagtgcatcagggccctgggacagaacaaggctcacaccccgttccgtgagagcaagctgacacaggtgctgagggactccttcattggggagaactctaggacttgcatgattgccacgatctcaccaggcataagctcctgtgaatatactttaaacaccctgagatatgcagacagggtcaaggagctgagcccccacagtgggcccagtggagagcagttgattcaaatggaaacagaagagatggaagcctgctctaacggggcgctgattccaggcaatttatccaaggaagaggaggaactgtcttcccagatgtccagctttaacgaagccatgactcagatcagggagctggaggagaaggctatggaagagctcaaggagatcatacagcaaggaccagactggcttgagctctctgagatgaccgagcagccagactatgacctggagacctttgtgaacaaagcggaatctgctctggcccagcaagccaagcatttctcagccctgcgagatgtcatcaaggccttacgcctggccatgcagctggaagagcaggctagcagacaaataagcagcaagaaacggccccagtgacgactgcaaataaaaatctgtttggtttgacacccagcctcttccctggccctccccagagaactttgggtacctggtgggtctaggcagggtctgagctgggacaggttctggtaaatgccaagtatgggggcatctgggcccagggcagctggggagggggtcagagtgacatgggacactccttttctgttcctcagttgtcgccctcacgagaggaaggagctcttagttacccttttgtgttgcccttctttccatcaaggggaatgttctcagcatagagctttctccgcagcatcctgcctgcgtggactggctgctaatggagagctccctggggttgtcctggctctggggagagagacggagcctttagtacagctatctgctggctctaaaccttctacgcctttgggccgagcactgaatgtcttgtactttaaaaaaatgtttctgagacctctttctactttactgtctccctagagtcctagaggatccctac

SEQ ID NO: 78 - DNA, 3492 bp, Homo sapiens
ggttggaggagcccggagcccgccttcggagctacggcctaacggcggcggcgactgcagtctggagggtccacacttgtgattctcaatggagagtgaaaacgcagattcataatgaaaactagcccccgtcggccactgattctcaaaagacggaggctgccccttcctgttcaaaatgccccaagtgaaacatcagaggaggaacctaagagatcccctgcccaacaggagtctaatcaagcagaggcctccaaggaagtggcagagtccaactcttgcaagtttccagctgggatcaagattattaaccaccccaccatgcccaacacgcaagtagtggccatccccaacaatgctaatattcacagcatcatcacagcactgactgccaagggaaaagagagtggcagtagtgggcccaacaaattcatcctcatcagctgtgggggagccccaactcagcctccaggactccggcctcaaacccaaaccagctatgatgccaaaaggacagaagtgaccctggagaccttgggaccaaaacctgcagctagggatgtgaatcttcctagaccacctggagccctttgcgagcagaaacgggagacctgtgcagatggtgaggcagcaggctgcactatcaacaatagcctatccaacatccagtggcttcgaaagatgagttctgatggactgggctcccgcagcatcaagcaagagatggaggaaaaggagaattgtcacctggagcagcgacaggttaaggttgaggagccttcgagaccatcagcgtcctggcagaactctgtgtctgagcggccaccctactcttacatggccatgatacaattcgccatcaacagcactgagaggaagcgcatgactttgaaagacatctatacgtggattgaggaccactttccctactttaagcacattgccaagccaggctggaagaactccatccgccacaacctttccctgcacgacatgtttgtccgggagacgtctgccaatggcaaggtctccttctggaccattcaccccagtgccaaccgctacttgacattggaccaggtgtttaagccactggacccagggtctccacaattgcccgagcacttggaatcacagcagaaacgaccgaatccagagctccgccggaacatgaccatcaaaaccgaactccccctgggcgcacggcggaagatgaagccactgctaccacgggtcagctcatacctggtacctatccagttcccggtgaaccagtcactggtgttgcagccctcggtgaaggtgccattgcccctggcggcttccctcatgagctcagagcttgcccgccatagcaagcgagtccgcattgcccccaaggtttttggggaacaggtggtgtttggttacatgagtaagttctttagtggcgatctgcgagattttggtacacccatcaccagcttgtttaattttatctttctttgtttatcagtgctgctagctgaggaggggatagctcctctttcttctgcaggaccagggaaagaggagaaactcctgtttggagaagggttttctcctttgcttccagttcagactatcaaggaggaagaaatccagcctggggaggaaatgccacacttagcgagacccatcaaagtggagagccctcccttggaagagtggccctccccggccccatctttcaaagaggaatcatctcactcctgggaggattcgtcccaatctcccaccccaagacccaagaagtcctacagtgggcttaggtccccaacccggtgtgtctcggaaatgcttgtgattcaacacagggagaggagggagaggagccggtctcggaggaaacagcatctactgcctccctgtgtggatgagccggagctgctcttctcagaggggcccagtacttcccgctgggccgcagagctcccgttcccagcagactcctctgaccctgcctcccagctcagctactcccaggaagtgggaggaccttttaagacacccattaaggaaacgctgcccatctcctccaccccgagcaaatctgtcctccccagaacccctgaatcctggaggctcacgcccccagccaaagtagggggactggatttcagcccagtacaaacctcccagggtgcctctgaccccttgcctgaccccctggggctgatggatctcagcaccactcccttgcaaagtgctcccccccttgaatcaccgcaaaggctcctcagttcagaacccttagacctcatctccgtcccctttggcaactcttctccctcagatatagacgtccccaagccaggctccccggagccacaggtttctggccttgcagccaatcgttctctgacagaaggcctggtcctggacacaatgaatgacagcctcagcaagatcctgctggacatcagctttcctggcctggacgaggacccactgggccctgacaacatcaactggtcccagtttattcctgagctacagtagagccctgcccttgcccctgtgctcaagctgtccaccatcccgggcactccaaggctcagtgcaccccaagcctctgagtgaggacagcaggcagggactgttctgctcctcatagctccctgctgcctgattatgcaaaagtagcagtcacaccctagccactgctgggaccttgtgttccccaagagtatctgattcctctgctgtccctgccaggagctgaagggtgggaacaacaaaggcaatggtgaaaagagattaggaaccccccagcctgtttccattctctgcccagcagtctcttaccttccctgatctttgcagggtggtccgtgtaaatagtataaattctccaaattatcctctaattataaatgtaagcttatttccttagatcattatccagagactgccagaaggtgggtaggatgacctggggtttcaattgacttctgttccttgcttttagttttgatagaagggaagacctgcagtgcacggtttcttccaggctgaggtacctggatcttgggttcttcactgcagggacccagacaagtggatctgcttgccagagtcctttttgcccctccctgccacctccccgtgtttccaagtcagctttcctgcaagaagaaatcctggttaaaaaagtcttttgtattgggtcaggagttgaatttggggtgggaggatggatgcaactgaagcagagtgtgggtgcccagatgtgcgctattagatgtttctctgataatgtccccaatcataccagggagactggcattgacgagaactcaggtggaggcttgagaaggccgaaagggcccctgacctgcctggcttccttagcttgcccctcagctttgcaaagagccaccctaggccccagctgaccgcatgggtgtgagccagcttgagaacactaactactcaataaaagcgaaggtggacaaaaaaaaaaaaaaaaaa

SEQ ID NO: 79 - DNA, 1396 bp, Homo sapiens
atgatccccaccttcacggctctgctctgcctcgggctgagtctgggccccaggacccacatgcaggcagggcccctccccaaacccaccctctgggctgagccaggctctgtgatcagctgggggaactctgtgaccatctggtgtcaggggaccctggaggctcgggagtaccgtctggataaagaggaaagcccagcaccctgggacagacagaacccactggagcccaagaacaaggccagattctccatcccatccatgacagaggactatgcagggagataccgctgttactatcgcagccctgtaggctggtcacagcccagtgaccccctggagctggtgatgacaggagcctacagtaaacccaccctttcagccctgccgagtcctcttgtgacctcaggaaagagcgtgaccctgctgtgtcagtcacggagcccaatggacactttccttctgatcaaggagcgggcagcccatcccctactgcatctgagatcagagcacggagctcagcagcaccaggctgaattccccatgagtcctgtgacctcagtgcacggggggacctacaggtgcttcagctcacacggcttctcccactacctgctgtcacaccccagtgaccccctggagctcatagtctcaggatccttggagggtcccaggccctcacccacaaggtccgtctcaacagctgcaggccctgaggaccagcccctcatgcctacagggtcagtcccccacagtggtctgagaaggcactgggaggtactgatcggggtcttggtggtctccatcctgcttctctccctcctcctcttcctcctcctccaacactggcgtcagggaaaacacaggacattggcccagagacaggctgatttccaacgtcctccaggggctgccgagccagagcccaaggacgggggcctacagaggaggtccagcccagctgctgacgtccagggagaaaacttctgtgctgccgtgaagaacacacagcctgaggacggggtggaaatggacactcggagcccacacgatgaagacccccaggcagtgacgtatgccaaggtgaaacactccagacctaggagagaaatggcctctcctccctccccactgtctggggaattcctggacacaaaggacagacaggcagaagaggacagacagatggacactgaggctgctgcatctgaagccccccaggatgtgacctacgcccagctgcacagctttaccctcagacagaaggcaactgagcctcctccatcccaggaaggggcctctccagctgagcccagtgtctatgccactctggccatccactaatccaggggggacccagaccccacaagccatggagactcaggaccccagaagg

SEQ ID NO: 80 - DNA, 625 bp, Homo sapiens
  misc_feature: n=a,t,g or c
cggcctttcatcgttggtttaaaatggctaatcagaataaaaaataaaagggcctctttgtggaggctgggatctcccctatttagaggttagaacccaggtatcccctctacccagcaccatagtgaggtgggctgaggggtaacccccaagggacaatcggaggggcctaggcctgccactccttctctctatccnccgtttngggaatgtgatgaaaaatattggttttnggattctcctctcctggccttggattttaaaatcaagttaactgtgtaagctaggggaggctccaaggggccagnaggagcacactctaatccctctcccccaaggaggggattatccantattgtttgagctaggccaagttattttcctgatctcccaccaccaccagtnttnggangtttggaccccnnncctagggaaactaatgtnaatnaatagattcaantnggntaacaagntaannntaaaannnnnttcccnttnntttnccnnnnnnnnntnnnccnnnnttnnnnnnaannnnnttnncctntnntnnnncnnnnnnnnnnnnnnnnnnnnncnnnnnnnnnnnnnnnnnnnncnnnnnnnnnnnnnnnnnnnnnnnnna

SEQ ID NO: 81 - DNA, 655 bp, Homo sapiens
  misc_feature: n=a,t,g or c
tgatccagtgctctcccatctaacaactaaacaggagccatttcaaggcgggagatattttaaacacccaaaatgttgggtctgattttcaaacttttaaactcactactgatgattctcacgctaggcgaatttgtccaaacacatagtgtgtgtgttttgtatacactgtatgaccccaccccaaatctttgtattgtccacattctccaacaataaagcacagagtggatttaattaagcacacaaatgctaaggcagaattttgagggtgggagagaagaaaagggaaagaagctgaaaatgtaaaaccacaccagggaggaaaaatgacattcagaaccagcaaacactgaatttctcttgttgttttaactctgccacaagaatgcaatttcgttaatggagatgacttaagttggcagcagtaatcttcttttaggagcttgtaccacagtcttgcacataagtgcagatttggctcaagtaaagagatttccttcaccactacttcactgggataatcagcagcgtactaccctaaaagcattcactagccaaagagggaatatcngtctccttcctgggcctatataagnctggtacaatgtggtgngctccaactttcatggaaagccattctatccatattatc

SEQ ID NO: 82 - DNA, 447 bp, Homo sapiens
tttattacatttaatttttaataattagtaatatgtaataattcatgcttagaatatcattggccaggctggaaacagacccaggtgcactgctggattgctgagttcgagaataagcaccaggctcccatcccggtggagtccttgctgctggatgtgggtcttgctggtcaaatgaatggagacccggagcacaggcagccgaggattgggcagtcatcgggatggcggctcatctgcaaatagccagtgcacacctccaggcaacaggatgacgagtctctgcagtgtgccctgagaccctgcagctaagtcctgagatggaaaagccaagcttgcaggctcttccatggaccactgaaatagaaagtctggggataagggcccagaggtcttcattttttcggaaacactccagcagatttttatgcagttccattctggatg

SEQ ID NO: 83 - DNA, 404 bp, Homo sapiens
caaaggtatatgtactttaattgtgacttgaactcaaggtaaataaattaaataattaataaattaaccttagcttactggacggccaccatcttatatgctgttcccttgactgaaatgttgtggggtaaatgactatatatgaaatcgggacttattggaggaattaatgcatctgataatggaggttgagaagttccacaacaggccatctgcacagcagagaccctgaaatgctggaagacggacttaatccagcccaaaaacctaagacccagggaagccgatggtgtaattcttagttcaaggccaaaatccttagatccttcgggaggccactggtgtatgccctggagtccaagggctagaaatcctagactctgatgtccacaggcagaagagtg

SEQ ID NO: 84 - DNA, 1050 bp, Homo sapiens
ggggggggggggcacttggcttcaaagctggctcttggaaattgagcggagacgagcggcttgttgtagctgccgtgcggccgccgcggaataataagccgggatctaccataccattgactaactatggaagattataccaaaatagagaaaattggagaaggtacctatggagttgtgtataagggtagacacaaaactacaggtcaagtggtagccatgaaaaaaatcagactagaaagtgaagaggaaggggttcctagtactgcaattcgggaaatttctctattaaaggaacttcgtcatccaaatatagtcagtcttcaggatgtgcttatgcaggattccaggttatatctcatctttgagtttctttccatggatctgaagaaatacttggattctatccctcctggtcagtacatggattcttcacttgttaagagttatttataccaaatcctacaggggattgtgttttgtcactctagaagagttcttcacagagacttaaaacctcaaaatctcttgattgatgacaaaggaacaattaaactggctgattttggccttgccagagcttttggaatacctatcagagtatatacacatgaggtagtaacactctggtacagatctccagaagtattgctggggtcagctcgttactcaactccagttgacatttggagtataggcaccatatttgctgaactagcaactaagaaaccacttttccatggggattcagaaattgatcaactcttcaggattttcagagctttgggcactcccaataatgaagtgtggccagaagtggaatctttacaggactataagaatacatttcccaaatggaaaccaggaagcctagcatcccatgtcaaaaacttggatgaaaatggcttggatttgctctcgaaaatgttaatctatgatccagccaaacgaatttctggcaaaatggcactgaatcatccatattttaatgatttggacaatcagattaagaagatgtagctttctgacaaaaagtttccatatgttatg

SEQ ID NO: 85 - DNA, 2627 bp, Homo sapiens
gctgacgccttcgagcgcggcccggggcccggagcggccggagcagcccgggtcctgaccccggcccggctcccgctccgggctctgccggcgggcgggcgagcgcggcgcggtccgggccggggggatgtctcggcggacgcgctgcgaggatctggatgagctgcactaccaggacacagattcagatgtgccggagcagagggatagcaagtgcaaggtcaaatggacccatgaggaggacgagcagctgagggccctggtgaggcagtttggacagcaggactggaagttcctggccagccacttccctaaccgcactgaccagcaatgccagtacaggtggctgagagttttgaatccagaccttgtcaaggggccatggaccaaagaggaagaccaaaaagtcatcgagctggttaagaagtatggcacaaagcagtggacactgattgccaagcacctgaagggccggctggggaagcagtgccgtgaacgctggcacaaccacctcaaccctgaggtgaagaagtcttgctggaccgaggaggaggaccgcatcatctgcgaggcccacaaggtgctgggcaaccgctgggccgagatcgccaagatgttgccagggaggacagacaatgctgtgaagaatcactggaactctaccatcaaaaggaaggtggacacaggaggcttcttgagcgagtccaaagactgcaagcccccagtgtacttgctgctggagctcgaggacaaggacggcctccagagtgcccagcccacggaaggccagggaagtcttctgaccaactggccctccgtccctcctaccataaaggaggaggaaaacagtgaggaggaacttgcagcagccaccacatcgaaggaacaggagcccatcggtacagatctggacgcagtgcgaacaccagagcccttggaggaattcccgaagcgtgaggaccaggaaggctccccaccagaaacgagcctgccttacaagtgggtggtggaggcagctaacctcctcatccccgctgtgggttctagcctctctgaagccctggacttgatcgagtcggaccctgatgcttggtgtgacctgagtaaatttgacctccctgaggaaccatctgcagaggacagtatcaacaacagcctagtgcagctgcaagcgtcacatcagcagcaagtcctgccaccccgccagccttccgccctggtgcccagtgtgaccgagtaccgcctggatggccacaccatctcagacctgagccggagcagccggggcgagctgatccccatctcccccagcactgaagtcgggggctctggcattggcacaccgccctctgtgctcaagcggcagaggaagaggcgtgtggctctgtcccctgtcactgagaatagcaccagtctgtccttcctggattcctgtaacagcctcacgcccaagagcacacctgttaagaccctgcccttctcgccctcccagtttctgaacttctggaacaaacaggacacattggagctggagagcccctcgctgacatccaccccagtgtgcagccagaaggtggtggtcaccacaccactgcaccgggacaagacacccctgcaccagaaacatgctgcgtttgtaaccccagatcagaagtactccatggacaacactccccacacgccaaccccgttcaagaacgccctggagaagtacggacccctgaagcccctgccacagaccccgcacctggaggaggacttgaaggaggtgctgcgttctgaggctggcatcgaactcatcatcgaggacgacatcaggcccgagaagcagaagaggaagcctgggctgcggcggagccccatcaagaaagtccggaagtctctggctcttgacattgtggatgaggatgtgaagctgatgatgtccacactgcccaagtctctatccttgccgacaactgccccttcaaactcttccagcctcaccctgtcaggtatcaaagaagacaacagcttgctcaaccagggcttcttgcaggccaagcccgagaaggcagcagtggcccagaagccccgaagccacttcacgacacctgcccctatgtccagtgcctggaagacggtggcctgcggggggaccagggaccagcttttcatgcaggagaaagcccggcagctcctgggccgcctgaagcccagccacacatctcggaccctcatcttgtcctgaggtgttgagggtgtcacgagcccattctcatgtttacaggggttgtgggggcagagggggtctgtgaatctgagagtcattcaggtgacctcctgcagggagccttctgccaccagcccctccccagactctcaggtggaggcaacagggccatgtgctgccctgttgccgagcccagctgtgggcggctcctggtgctaacaacaaagttccacttccaggtctgcctggttccctccccaaggccacagggagctccgtcagcttctcccaagcccacgtcaggcctggcctcatctcagaccctgcttaggatgggggatgtggccaggggtgctcctgtgctcaccctctcttggtgcatttttttggaagaataaaattgcctctctctttg

SEQ ID NO: 86 - DNA, 490 bp, Homo sapiens
atccctgactcggggtcgcctttggagcagagaggaggcaatggccaccatggagaacaaggtgatctgcgccctggtcctggtgtccatgctggccctcggcaccctggccgaggcccagacagagacgtgtacagtggccccccgtgaaagacagaattgtggttttcctggtgtcacgccctcccagtgtgcaaataagggctgctgtttcgacgacaccgttcgtggggtcccctggtgcttctatcctaataccatcgacgtccctccagaagaggagtgtgaattttagacacttctgcagggatctgcctgcatcctgacgcggtgccgtccccagcacggtgattagtcccagagctcggctgccacctccaccggacacctcagacacgcttctgcagctgtgcctcggctcacaacacagattgactgctctgactttgactactcaaaattggcctaaaaattaaaagagatcgatatt

SEQ ID NO: 87 - DNA, 1782 bp, Homo sapiens
gaattccggaaatgaccctgcccgggggcccaacgggcatggcgcggccggggggcgcgaggccctgcagcccggggctggagcgggccccgcgccggagtgtcggggagctgcgcctgctcttcgaggcgcgctgtgcggcggtcgctgcggccgccgccgcgggggagccccgggcccgcggggccaagcggcgtgggggacaggtccccaacgggcttccgcgggctcccccggccccggtgatccctcagctgaccgtgacagccgaggagcccgacgtgcccccgaccagccctgggccgccggagcgggagagggactgcctcccggcagcgggctcttcgcacctgcagcagccgcgccgcctttccacctcgtcggtctcctccactggctcctcgtcgctgctcgaggactcggaggacgacctgctgagcgacagtgagagccggagccgcggcaacgtgcagctggaagcgggcgaggacgtgggtcagaaaaaccactggcagaagatccggaccatggtcaatctgccggtcataagccctttcaagaagcgctacgcctgggtgcagctggcagggcacactgggagttttaaggcggcgggcaccagcgggctgatcctgaagcgctgctcggagccggagcgctactgcctggcgcggctgatggctgacgcgctgcgcggctgcgtgcctgccttccacggcgtggtggagcgcgacggcgaaagctacctgcagctgcaggacctgctcgatggcttcgacggaccttgtgtgctcgactgcaaaatgggcgtcaggacttacctagaggaggagctgaccaaggcccgtgagcggcccaagctgcggaaggacatgtacaagaaaatgctggcggtggatcctgaagctcccacggaggaggagcacgcgcagcgcgccgtcaccaagccgcgctacatgcagtggcgggaaggcatcagctccagcaccaccctcggcttccgcatcgagggcatcaagaaagcggacggctcctgcagcaccgacttcaagactacgcgaagccgagagcaggtgcttcgcgtctttgaagagtttgtgcaaggagatgaggaagtgctgaggcggtatctgaaccgcctgcagcagatccgggacaccctggaggtatccgagttcttcaggaggcacgaggtgatcggcagctcgctcctctttgtgcacgatcactgccatcgcgccggcgtgtggctcatcgacttcggcaagaccacgcccctccccgatggccagatcctggaccaccggcggccctgggaggagggcaaccgcgaggacggctatttgctggggctggacaatctcattggcatcctggccagcctggctgagagatgaggctggactcctgtccccgcgggccgctcacctgacatgtggacctgcagctttgtccccactgtgcatgccggcttgagactggagccccgcggtgcagggcagttcaccgggtcctgcaggaccaggtgccagccactaagggggggcaccgccgatgccaggggttttgcccacccgggccccagcgttcccagagccaaatgacactaacttatagaaggggagggggcaaagggcttcttcctcaggccagctcttctgaggaggctctgccctctccagaggtgccagaccgcggattttatttagcaagcccagaccttccggtctaacgtctcacaccacgacggactccccttcctaataaaactcaaagacaaaa

SEQ ID NO: 88 - DNA, 1707 bp, Homo sapiens
cggcgctgggctgaggggaggggttgtcttaaaagtctctccttccccctgtaggggcggccggcgagtcccagtgagagcggagggtgccagaggtagggggccgagaaacaaagttcccggggcttcctccggggccgcggtcggggctgcgcgtttgaccgcccccctcctcgcgaagcaatggcttccaaactcctgcgcgcggtcatcctcgggccgcccggctcgggcaagggcaccgtgtgccagaggatcgcccagaactttggtctccagcatctctccagcggccacttcttgcgggagaacatcaaggccagcaccgaagttggtgagatggcaaagcagtatatagagaaaagtcttttggttccagaccatgtgatcacacgcctaatgatgtccgagttggagaacaggcgtggacagcactggctccttgatggttttcctaggacattaggacaagccgaagccctggacaaaatctgtgaagtggatctagtgatcagtttgaatattccatttgaaacacttaaagatcgtctcagccgccgttggattcaccctcctagcggaagggtatataacctggacttcaatccacctcatgtacatggtattgatgacgtcactggtgaaccgttagtccagcaggaggatgataaacccgaagcagttgctgccaggctaagacagtacaaagacgtggcaaagccagtcattgaattatacaagagccgaggagtgctccaccaattttccggaacggagacgaacaaaatctggccctacgtttacacacttttctcaaacaagatcacacctattcagtccaaagaagcatattgaccctgcccaatggaagaaccaggaagatgtggtcattcattcaatagtgtgtgtagtattggtgctgtgtccaaattagaagctagctgaggtagcttgcagcatcttttctagttgaaatggtgaactgataggaaaacaaatgagtagaaagagttcatgaagaggccctcctctgcctttcaaaaggctggtcacctacacatgtttaaggtgtctctgcacatgtctcaagcccatcacaagaaagcaagtacagtgtggatttcaaatggtgtgtaacttcagctccagctggtttttgacagctgttgctgtggtaatatttttgacatgtgatggtgatagtctctggttctccccatccccacaaaggctgttgaaccacagcaccaggaagcctgagaatgaatcctgagggctctagcccaggctttgtcccaggctttctggtgtgtgccctcctggtaacagtgaaattgaagctacttactcatagtggttgtttctctggtcttgagtgactgtgtccacagttcatttttttccggtaggaataactccttttctacatccacgctccatagagtctctccttttcagacatcctgggatgaaagaatttggcttttttttttcttttttttttggacatctgttttcactcttaggcttttaaacaatagttattgcttttatccctctcagattctaataactgagagcgatggggctatattgaatctctgtatgcactgagaactgagctatgaagagaatcttattaaactgctggtctgactttatggattgacactgttcctttcttttattgtgaaaaaaaaaaaaaaa

SEQ ID NO: 89 - DNA, 1552 bp, Homo sapiens
gcccgtacacaccgtgtgctgggacaccccacagtcagccgcatggctcccctgtgccccagcccctggctccctctgttgatcccggcccctgctccaggcctcactgtgcaactgctgctgtcactgctgcttctgatgcctgtccatccccagaggttgccccggatgcaggaggattcccccttgggaggaggctcttctggggaagatgacccactgggcgaggaggatctgcccagtgaagaggattcacccagagaggaggatccacccggagaggaggatctacctggagaggaggatctacctggagaggaggatctacctgaagttaagcctaaatcagaagaagagggctccctgaagttagaggatctacctactgttgaggctcctggagatcctcaagaaccccagaataatgcccacagggacaaagaaggggatgaccagagtcattggcgctatggaggcgacccgccctggccccgggtgtccccagcctgcgcgggccgcttccagtccccggtggatatccgcccccagctcgccgccttctgcccggccctgcgccccctggaactcctgggcttccagctcccgccgctcccagaactgcgcctgcgcaacaatggccacagtgtgcaactgaccctgcctcctgggctagagatggctctgggtcccgggcgggagtaccgggctctgcagctgcatctgcactggggggctgcaggtcgtccgggctcggagcacactgtggaaggccaccgtttccctgccgagatccacgtggttcacctcagcaccgcctttgccagagttgacgaggccttggggcgcccgggaggcctggccgtgttggccgcctttctggaggagggcccggaagaaaacagtgcctatgagcagttgctgtctcgcttggaagaaatcgctgaggaaggctcagagactcaggtcccaggactggacatatctgcactcctgccctctgacttcagccgctacttccaatatgaggggtctctgactacaccgccctgtgcccagggtgtcatctggactgtgtttaaccagacagtgatgctgagtgctaagcagctccacaccctctctgacaccctgtggggacctggtgactctcggctacagctgaacttccgagcgacgcagcctttgaatgggcgagtgattgaggcctccttccctgctggagtggacagcagtcctcgggctgctgagccagtccagctgaattcctgcctggctgctggtgacatcctagccctggtttttggcctcctttttgctgtcaccagcgtcgcgttccttgtgcagatgagaaggcagcacagaaggggaaccaaagggggtgtgagctaccgcccagcagaggtagccgagactggagcctagaggctggatcttggagaatgtgagaagccagccagaggcatctgagggggagccggtaactgtcctgtcctgctcattatgccacttccttttaactgccaagaaattttttaaaataaatatttataat

SEQ ID NO: 90 - DNA, 3348 bp, Homo sapiens
gtactcctcaaccactctcctaatgattggaacaaaagaaaaaaaaagaaaaaaaaagccatgaagtcagcgagagctaagacaccccggaaacctaccgtgaaaaaagggtcccaaacgaaccttaaagacccagttggggtatactgtagggtgcgcccactgggctttcctgatcaagagtgttgcatagaagtgatcaataatacaactgttcagcttcatactcctgagggctacagactcaaccgaaatggagactataaggagactcagtattcatttaaacaagtatttggcactcacaccacccagaaggaactctttgatgttgtggctaatcccttggtcaatgacctcattcatggcaaaaatggtcttctttttacatatggtgtgacgggaagtggaaaaactcacacaatgactggttctccaggggaaggagggctgcttcctcgttgtttggacatgatctttaacagtatagggtcatttcaagctaaacgatatgttttcaaatctaatgataggaatagtatggatatacagtgtgaggttgatgccttattagaacgtcagaaaagagaagctatgcccaatccaaagacttcttctagcaaacgacaagtagatccagagtttgcagatatgataactgtacaagaattctgcaaagcagaagaggttgatgaagatagtgtctatggtgtatttgtctcttatattgaaatatataataattacatatatgatctattggaagaggtgccgtttgatcccataaaacccaaacctccacaatctaaattgcttcgtgaagataagaaccataacatgtatgttgcaggatgtacagaagttgaagtgaaatctactgaggaggcttttgaagttttctggagaggccagaaaaagagacgtattgctaatacccatttgaatcgtgagtccagccgttcccatagcgtgttcaacattaaattagttcaggctcccttggatgcagatggagacaatgtcttacaggaaaaagaacaaatcactataagtcagttgtccttggtagatcttgctggaagtgaaagaactaaccggaccagagcagaagggaacagattacgtgaagctggtaatattaatcagtcactaatgacgctaagaacatgtatggatgtcctaagagagaaccaaatgtatggaactaacaagatggttccatatcgagattcaaagttaacccatctgttcaagaactactttgatggggaaggaaaagtgcggatgatcgtgtgtgtgaaccccaaggctgaagattatgaagaaaacttgcaagtcatgagatttgcggaagtgactcaagaagttgaagtagcaagacctgtagacaaggcaatatgtggtttaacgcctgggaggagatacagaaaccagcctcgaggtccagttggaaatgaaccattggttactgacgtggttttgcagagttttccacctttgccgtcatgcgaaattttggatatcaacgatgagcagacacttccaaggctgattgaagccttagagaaacgacataacttacgacaaatgatgattgatgagtttaacaaacaatctaatgcttttaaagctttgttacaagaatttgacaatgctgttttaagtaaagaaaaccacatgcaagggaaactaaatgaaaaggagaagatgatctcaggacagaaattggaaatagaacgactggaaaagaaaaacaaaactttagaatataagattgagattttagagaaaacaactactatctatgaggaagataaacgcaatttgcaacaggaacttgaaactcagaaccagaaacttcagcgacagttttctgacaaacgcagattagaagccaggttgcaaggcatggtgacagaaacgacaatgaagtgggagaaagaatgtgagcgtagagtggcagccaaacagctggagatgcagaataaactctgggttaaagatgaaaagctgaaacaactgaaggctattgttactgaacctaaaactgagaagccagagagaccctctcgggagcgagatcgagaaaaagttactcaaagatctgtttctccatcacctgtgcctttactctttcaacctgatcagaacgcaccaccaattcgtctccgacacagacgatcacgctctgcaggagacagatgggtagatcataagcccgcctctaacatgcaaactgaaacagtcatgcagccacatgtccctcatgccatcacagtatctgttgcaaatgaaaaggcactagctaagtgtgagaagtacatgctgacccaccaggaactagcctccgatggggagattgaaactaaactaattaagggtgatatttataaaacaaggggtggtggacaatctgttcagtttactgatattgagactttaaagcaagaatcaccaaatggtagtcgaaaacgaagatcttccacagtagcacctgcccaaccagatggtgcagagtctgaatggaccgatgtagaaacaaggtgttctgtggctgtggagatgagagcaggatcccagctgggacctggatatcagcatcacgcacaacccaagcgcaaaaagccatgaactgacagtcccagtactgaaagaacattttcatttgtgtggatgatttctcgaaagccatgccagaagcagtcttccaggtcatcttgtagaactccagctttgttgaaaatcacggacctcagctacatcatacactgacccagagcaaagctttccctatggttcaaagacaactagtattcaacaaaccttgtatagtgtatgttttgccatatttaatattaatagcagaggaagactccttttttcatcactgtatgaattttttataatgtttttttaaaatatatttcatgtatacttataaactaattcacacaagtgtttgtcttagatgattaaggaagactatatctagatcatgtctgattttttattgtgacttctccagccctggtctgaatttcttaaggttttataaacaaatgctgctatttattagctgcaagaatgcactttagaactatttgacaattcagactttcaaaataaagatgtaaatgactggccaataataaccattttaggaaggtgttttgaattctgtatgtatatattcactttctgacatttagatatgccaaaagaattaaaatcaaaagcggaattcctgcagcccgggggatccactagttctagagcggccgccaccgcggtggagctccagcttttgttccctttagtgagggttaatttcgagcttggcgtaatcat

SEQ ID NO: 91 - DNA, 368 bp, Homo sapiens
gaagagacgtggtaagtgcggtgcagttttcaactgacctctggacgcagaacttcagccatgaaggtaacaggcatctttcttctcagtgccttggccctgttgagtctatctggtaacactggagctgactccctgggaagagaggccaaatgttacaatgaacttaatggatgcaccaagatatatgaccctgtctgtgggactgatggaaatacttatcccaatgaatgcgtgttatgttttgaaggtcggaaacgccagacttctatcctcattcaaaaatctgggccttgctgagaaccaaggttttgaaatcccatcaggtcaccgcgaggcctattgttgaataaatgtatctgaatatc

SEQ ID NO: 92 - DNA, 1610 bp, Homo sapiens
  misc_feature: n=a,t,g or c
cgtaacaggacaaggagtcctgctccggcacgtggccacagaaaactacttaggaagcctgtggtgagaacaacaacagtgcctggagaatcccacggctctggggaagtgagccccgaggatgaggctgctcgcctggctgattttcctggctaactggggaggtgccagggctgaaccagggaagttctggcacatcgctgacctgcaccttgaccctgactacaaggtatccaaagaccccttccaggtgtgcccatcagctggatcccagccagtgcccgacgcaggcccctggggtgactacctctgtgattctccctgggccctcatcaactcctccatctatgccatgaaggagattgagccagagccagacttcattctctggactggtgatgacacgcctcatgtgcccgatgagaaactgggagaggcagctgtactggaaattgtggaacgcctgaccaagctcatcagagaggtctttccagatactaaagtctatgctgctttgggaaatcatgattttcaccccaaaaaccagttcccagctggaagtaacaacatctacaatcagatagcagaactatggaaaccctggcttagtaatgagtccatcgctctcttcaaaaaaggtgccttctactgtgagaagctgccgggtcccagcggggctgggcgaattgtggtcctcaacaccaatctgtactataccagcaatgcgctgacagcagacatggcggaccctggccagcagttccagtggctggaagatgtgctgaccgatgcatccaaagctggggacatggtgtacattgtcggccacgtgcccccggggttctttgagaagacgcaaaacaaggcatggttccgggagggcttcaatgaaaaatacctgaaggtggtccggaagcatcatcgcgtcatagcagggcagttcttcgggcaccaccacaccgacagctttcggatgctctatgatgatgcaggtgtccccataagcgccatgttcatcacacctggagtcaccccatggaaaaccacattacctggagtggtcaatggggccaacaatccagccatccgggtgttcgaatatgaccgagccacactgagcctnnaggacatggtgacctacttcatgaacctgagccaggcgaatgctcaggggacgccgcgctgggagctcgagtaccagctgaccgaggcctatggggtgccggacgccagcgcccactccatcgacacagtgctggaccgcatcgctggcgaccagagcacactgcagcgctactacgtctataactcagtcagctactctgctggggtctgcgacgaggcctgcagcatgcagcacgtgtgtgccatgcgccaggtggacattgacgcttacaccacctgtctgtatgcctctggcaccacgcccgtgccccagctnccgntgctgctgatggccctgctggggctgtgcacgactcgtgctgtgacctgccaggctcaccattcttcctggtaacgggtaacgggggcagcgcccaggatcacccagagctgggccttccaccatttcctccgcgcctgaggagtgaactgaatggacaccgatc

SEQ ID NO: 93 - DNA, 397 bp, Homo sapiens
  misc_feature: n=a,t,g or c
gtacaaatccaaggttttaatggctgttaaataataaaaggaaggatatttgcactatatacattcngtccactgacgatactgtcagctggccatgcattttattgcacatataaacagtgtacaaggatcttgaagacgtcttagccatagaaggactgcatttaaaagaaaaaaaagcaattttacagaagactgaagccatttacattacacaaccaacttcaagaaaataataaaaattaatatcaaaagaaatactttaattttgaaaaaaaaatctctcaaaacaatggattacaaagcttcatgctaccatatatacacgtaagaaaatatttcaggaccccgcattctgaatgcccgtgaaggtgcagcaggctaaactcctacttat

SEQ ID NO: 94 - DNA, 471 bp, Homo sapiens
tcaaacaataacttttattttatacttctctatactttgtagcaaatctttttttgctgaatttaatttataataaactttttaaattacatctctctctcttttttttttaaaatcaaggctcttttatgtcaaaatctttttttagctatattttagattaacatttaacatcccccccttgtgatctataccgttggatattcaggtattactgtgtgtgtaacagctaaaacaaggacgggaggagggaaaataaatggcagtgaacttggacggatgcatcaacaacagcagataaagctaacccctcagtgaccatagcagcatgtcttctggaagcctttactcttaccccagagatttcctcagccccttccctctctccctcctatcctccaaacacaaagccaacagtctgtcctttcgcttttcttgaggagaaatgtgcagtggaaatgatcaaaacaa

SEQ ID NO: 95 - DNA, 463 bp, Homo sapiens
  misc_feature: n=a,t,g or c
tcaacttttttattacacagtaaagaatacaacaatacctgaatcatactttaaagattcacaggttgacagaccatacattacagtccaactaaggaaaaaaggataaacaagaaaccacagttcagacatagtagacttaaaagctcaagagtatgctgacaaaagcatgatgcctagaccccaccccccagtgttagtctaccattaacttgtggtacatgtctgaattaagtattgcacaacaactttaatttttcacaatgtcgcagaacccaaaataatattttaaaaaaattacttcaaatctgcatttcaacagtctccaattttttttctggtcccttgaggaatttcggacancatggagtcgctttnctttccctaagtattccagacgtaggcatggctttgcataaggtaaaaccagccttgaaatttttaaatccccaaggacatggca

SEQ ID NO: 96 - DNA, 248 bp, Homo sapiens
  misc_feature: n=a,t,g or c
tcatattgtacaactatgatattaggtattaagcgacgtaattctttctctactagtgaaccagtttatttcacttagcaaactctaaattgagggaaatatataatctgagaacacacagaaaaatatattgaaaaaccaatagagaattatttttaaccatcataaaaactcaatcttaattaactgatagtctttaacttaaaaaaaagagtaatcnagattggaaattgggaattaaaaatatt

SEQ ID NO: 97 - DNA, 414 bp, Homo sapiens
  misc_feature: n=a,t,g or c
ttttttttttttttgcagatcactttgtatttattacattactgaactttttcaaatgacagaattcaactccaaaataaagtaataaatgcctattaaataattattcacttgtatttttctcncctaaaattttnaccccagcaaaacatcttaaagacatgtgaataggttcagtgcactctcagtggctcacaatcatgaggcaaatactacatttatccataaaaatataagataaacagatcaatattttaaaatattgctgacataaaaggaaaaaataaaatactacacttttaccacaattattttggtagatgatagtagaacattgtttaaaataatgctcctctacaggacacatgctgtgcttggtatacttgggcacattagcagttgggtaactggtcc

SEQ ID NO: 98 - DNA, 394 bp, Homo sapiens
aacaaaaaactaaataaatttattccataaagattttaaacttctacaattcattaaaaagacataaattcaaaagtcaaaatggtaaaaatattcacaacatatgacaatcaaatggttaatttccttttataaagagtttataggaataaatgagaaagaagtaaacccaaataaaagtagacaaaggtcatgagcagttcatttaaaaagaaatacaaatatctataaacatacgaaaagataatcaccttaatatcattaataattaatattttctcccacatcagcaaaaatctgcatgtttgttaaagctgagtgttttaagggtgtgatgaaatggacaccatttacacaggactgcctttcaggaaggttctctgccactggaaaa

SEQ ID NO: 99 - DNA, 429 bp, Homo sapiens
cctcaaaactgctttattaggaatgtaccagggattgagttaggggagttggacagccccggctcctataggagtcctacttctctccagcatcctgtgccatcctcttgacgtaatcgttgtacattgtgtacacagcacctagcatgattgcacccactgcacaggcctgcgctgccactcgggtgtgaatcaggtgtatggacatcttggtggaaccacgagacctcagccggtaaatcctgtatgctgctaccaccaagcagcctcctaagcctataggaccagtggagattcccgagtcttcctcaggagcttctcagacacacagtcttcatcgtcaggtgggtacccaccagcgtctgttagcagacataatcctggacctggatgtaagcagctgagactcctatgctgcagcccgtccta

SEQ ID NO: 100 - DNA, 531 bp, Homo sapiens
  misc_feature: n=a,t,g or c
aaaacaatgagatagctttacatttcccctttgtttgaatgagaaaatggatcttgggttgctatgctagaacacttgtagattgctgggtcctttgtaagggggccatggacacaccacactttctttcaatccttacatttgaagcattgatattcttcaaaaccttcttgttacatgtgcgcaatagaaatttctaatgttcatgacttttatctttcctgtccatcaattcactggttgtaaatgcttcctgagagctgtctaggtctgtatcccagattgttgcttaatgacatctgacagatgcattgttttctgaaatcagcttaagacaccaattgtggcaactgggaaactcattacctgctgcattggatcaactatgggaaggttgggagcagggggtggggcggaggtcaccctaaccaatcaatggaagggcaactcacacctggctcccaagcctcagctttgagaaacaaacacgtttataaggaaaaaatatataggcncattattaccggaagt

SEQ ID NO: 101 - DNA, 466 bp, Homo sapiens
  misc_feature: n=a,t,g or c
tttcggttttcacacttttattgtaaagctcgggaataattacacgggtctttcattgacagctcagcaaacaaaccggaaacgaaccgaaccggagggngtaggggcggtgctgcgcatgctcgcggcggggtggggggggggtgggggtgggntctctggggtacaagagtcaagaccccagcagcacagctcccaaaggcaccagacgaccccgcagcctgtacccacccctcgcaatcttggaccacctccccaagcttagactaagtcaagcaagggccataccctgagtctccagcctcccagcctgggcccctagggagctggagaggtatgggccaaggcagtgggggtttctggaagaaagaggggctgaggctttgagatggccacagtgggagacgggggctctgcaggacgccccttacaccctggccccctgaggtgaagaagagaattcacc

SEQ ID NO: 102 - DNA, 252 bp, Homo sapiens
ttttttttgggtgttttattatttatttacttgacaggtaacatcgatttggtcctacaagacaccatgctataggcttagctacttgctgttgcacaagagaactttcctgaactctcaggaagcccttgcatggcctatcgaggacagctcagtcactgaagggaaaaattccataccaaagaagagagaaaaattccataccaaagaacagacttcccccagggaacctccgtcctacagcccttcacg

SEQ ID NO: 103 - DNA, 178 bp, Homo sapiens
tttttttttacttattcactcaacaatcatttattgtttgtgtgcaaggcctgtgttaggtgccaagagcagaaggaagaagatacaaatatgaatgggcatattctgccctccaggaacatacaatctaagagtgattaattgcatacaaataattgtaataccagatagaatgttg

SEQ ID NO: 104 - DNA, 567 bp, Homo sapiens
  misc_feature: n=a,t,g or c
agagaagaccgtggatcacctggggacagaggtgaaaggcctgctgggctgctggaggagctggcctggaacctgcccccgggacccttcagccccgctcccgaccttctcggagatggcttctgagccctggagctggagcccagcagttggaggtggtgcacctgccaggcagcgccacagaaccagccctgtcctctcgacttccttccttagcttcatgtgaaataaaagctattctggtctcctctgtgtctgctgacagagtaacccgtttaactacagcctcctctcactccacttccatgcctggaggaagcctgcaaccccctccaggctcagacctggggacacccccantcctgtcatttataggggaagatggagcaggggttgattcacacagatggggggccctctgaattggcctgcttctcagaatgttggccataggtnaaaagcaaggggatcggggttcaggaccancagaatgtttagtgaatctgnatgaatgagaccccaggatttatgtgtccattaagtggttgttgtgntttaaaaaaaaaa

SEQ ID NO: 105 - DNA, 406 bp, Homo sapiens
tttttaagagtatacaagtttattttaaggtgttcatagggttaccagttggataggtcataataatatatagagatatgggaaattaagacctatgaagttttaattatttgcataagagtatgcccttgcatcataagaaaacatataaaaacagaaatatgtttcaaacttgtatataacatatatatacatgttcaacttgatcaggttcttactgaaattatttatttatttttattatactttaagttctgggatacatgtgctgaatgtgcaggtttgttacacaggtatacatgtgccatggtactttgctgcacccatcaacccatcatctacatcaggtatttctcctaatgctatccctcccctagcccccatccccccaacagggccccagctc

SEQ ID NO: 106 - DNA, 429 bp, Homo sapiens
tttttttactgaaacaagaaactctcagatgcaagtcaaaaagcagaaaatattttacaatattaaaaagtcatctgtagttaggttcggcatattaatgagatcctgagcactgagcatttatggacaatatggccttcgtttgatgcataaaaaggaaattcaacacaaacacgttgttaaaaccgtgccagaagatgcgctagagttttctctcattttaattacaatcagtgccagtatctgtattacctgtgaaggcctccaagaaagggtcatggaagcttattgggaataatcctctcaattagaaaaaaagaaagaagaaaagaaaatcagatccattgtggtttagaaatagatatttgcatggaaaagtttttatctcttctctttcctctcctggtaagtaaagatttgccattggta

SEQ ID NO: 107 - DNA, 458 bp, Homo sapiens
  misc_feature: n=a,t,g or c
tttttttttttcagcttttaactgtttattataaagacatatttacacagaacaatctttacaaacattgaacacaggggaagggaacaatttcttaatgaacagggccttaatatctttgtataaattagtataagaatcataaacaaccactttaaataaggcagcccccctagcccacccactaccctcttctgttccctatctcccagctttcttagccatcccccactttctccccttccccacgggcttgggcttggctgcaggtcatggcaggccgatgagnagngagacacagaaaggaagggggaaagaaggcccaatccctgatgggggcgtcagtggcagaagagactttctgggcaccgaccagtccccactccaagcatggagcctttaagcagcagcagcagcagcagcagcgttanagcaagcataggtaaaggggcttgggg

SEQ ID NO: 108 - DNA, 399 bp, Homo sapiens
tttttttttttttttttttccattttcatatcctattttatttttgaagtcagtgtccagaaagaaaccgacgattcactcaatcaacatgtaagcgactgaggcatccctacacaccaggtttgcaggctagggaccagagacacgatggttaaacaagccagagccctgtgatcctagggcttacaatgctggcataagaaaatccttctggactcactgtccccatgcttgtgactgtcatgtgccaagtgcgctttacacaatctcatttttccctcaacttggggataggttttgtatcattcccattacagatacggatgctgaggttactgagtggaagaggaaacctgaattctgctgctggaccccaaaactcatgtttaattacccaaa

SEQ ID NO: 109 - DNA, 420 bp, Homo sapiens
  misc_feature: n=a,t,g or c
catgttgtccttttattgtgtcaaattataatgatatcattaaaatcctgctagattcagaaaaaactgtagggaagcaataaacaatttgactttccaaatgatgaggaaagttattgaatttaccaaacataaatataaaaatagtattttgttgtataattaagacttatagctagagaagtagaaatgtacacaaaaaaaacatttggtatcaataatttggttgtgcattcatttattcagtcaacaaatatttagctgagcactggctagctgccaggtattgcactaaggacccaaagatgggaagagatgatgtccctgccctcatggagcttgcagtcgtgttgagcagactgtcaaaccagatttaggtaaggcaatgtgacccagtgcccatgntaccaaaccagggat

SEQ ID NO: 110 - DNA, 422 bp, Homo sapiens
tggaggaataagcattttttaatttcttatataaaatgctaacttcttgtcaggacatactacagactatgcattgaattttttgacaaacttcctgtaatctttttattaatttacactgagggaatatagcatttaaaaaacaattacatttaaaaatctggattcttgatgttaaatctcttcgactccagatacacaatttcctggaagctgatggaaagtgattctatttctgacaatgaaagaggctcagaaagagtcctaatttgctttcacagtacaggcattttccaaaacctggttctgggcttacggagcacacacacacaaatcttaatgcaatgaacaatatttcaaaccttatttcccaaagcaaaacctagggcttaagacgtcaaaatcttccaacagttctagac

SEQ ID NO: 111 - DNA, 572 bp, Homo sapiens
ttttttgacattgttctactgttttattgactcgttgcatttacaagttttgctaatgatacacagtctacacttactaataaattatactcacagtgtttttagtgatgtgactttgtttcaatattttataataaaagattataggagtaattacagacaatgatagaaaagtttgaggcatcgtgacaaaatagtgcaaaagcctaagttatccaaaagatgtagtgatcataattataaagactgtgtagtgtccctgggaaatgcttacaatgagataccaagcagtcaaaacggaatctaaccacgcacctgtacagtagttacaaaggtattacaaagcttgtctctgcatgaacacagtaaagaagtcacacatacacaaacgactacaatggtgttctggtattgcgactgtttgttttttcttctttaaatattattttgctttattgttgtaatgttatttttgtaataaataaattcagagagaacatcctactattagacaaggaaaatgccagaaatctgagatattttccctcttatggccgtattatattggttac

SEQ ID NO: 112 - DNA, 403 bp, Homo sapiens
  misc_feature: n=a,t,g or c
tttttttttttttttttttttttgcattgttttacatcttaagccctttattgactacaatgcagaacattttattttaagacacagtgggttttgtttttgttgatgttttcaccaattcaactgaagacgaaagcaagacaatcaaatggtaactagtagcagcctatcagtaaatgagggcaagtatagagactgttctttggactgaggttaaatcaattagtcaataaaggcttttccactgtctaataattataacatattaacagtcgccaaatagtgttggatgggactcctctagaaataactaaagcctttcattttatacatgaaatagccacaaaatgtagatgggttacatcaactcattgggatttgcccatttaaattacnctgagat

SEQ ID NO: 113 - DNA, 634 bp, Homo sapiens
  misc_feature: n=a,t,g or c
tcagaagcactaaaaaaatctttattggatgtccgcaacaacccatgcaatggggtaggagttggagacaccaggaaggcttggggatagaaacacaagatgcaagtccttgaccacagaatcagatcacacagtcacctttccttccacaatatcccagggacaatgaaagcaagttcaaccaagatgctgaaagagctggatcattcccatctcatttcagtggcatcacagattctttggagttgcatgcttgcaacgtggaaatgtgtttcccacagccccactagggattctcaggctaggaagttgccaaactgcaagactacatcactgacctggtatcccaggagcagcaggagaggaggaggaggaggaggagttgtcctgttcctgtcctgagtgggccccttcatgataacggggaaactggccttggcctctgttacctcctctgtccctgtccccaatcctgggagcatgtgtgagttctgtcttcctctaccacagtctcccctctgcntccctccggagcactccctgccatgacccactctctaaaatgatccccctctccttgctaatgacatctcagatgggccagaaganagcanctgatggattagtcacctaa

SEQ ID NO: 114 - DNA, 447 bp, Homo sapiens
tatggtagtaacagtttcattcagttttgcattttacaaatttaaacaaaagtctttcttttttttttttctttacttgcatgtttgtcttttgagtgtgttttcaatttgtgcattccttagaaaatctttgtgtggactttggagtttctccctgaaatgtgccaggcgcctgagtcagacacaaacactcccttaggaccttcgtcagaaactccacccctgtgtggaatctccttcctctctctctctccggagatgccacccgaattcgaatgtgactgtgtgtttctgctgagaggtccattgtcatccccagatgaaagaagagaccaaagcagttaccactgatggaagccagtgaagatggttgggggaactccttaacctttcctgggaatgttttgaacgaggacgccgggtcctttggccagtcaggaaccagca

SEQ ID NO: 115 - DNA, 464 bp, Homo sapiens
ggtatacaggtgccatttaatccattcaaatttggaagctacatcttcaagggtctgagagagctcactccccccatatattccccctttacatgttttcttataagacatacagtttaatcaattaacaaactaaacagcttatatactggcaatatattacagatgggtttatgtcagagtaatagatcacatgaaatggaccatgtggtaccccagtgcattatgtcttggtagagccctgaggacactgacagtagcatctctaagtaagtagtgctgtatgaatacagacacatgcggatctgtatctacatccatctgactaggccaaggagcaggtagatgcaagattagagacacacacatgctggatggggccactgcacaccttgtcatgccatttaaaaggggcagttacaggttgcccggttttgcagccattaaaattacactttatggaa

SEQ ID NO: 116 - DNA, 253 bp, Homo sapiens
tttttcagctagaaataagttattttattttaaaacacatacagattaataaatattactggaaaacttaatagcctttttatttacatgaggcaataacaacatgctatgactacatctataaagcaaaatataagcaggtcttggccactgacacatgtgtctatgtatgctaattggaagctccccaatacatgtctatgacaaaacttttacacaaccaatcaacatttgacattttttacatcttctt

SEQ ID NO: 117 - DNA, 419 bp, Homo sapiens
ttttttttttttttttttttcattttccttgaagtttattgactgttactggtggcagacaaattccataaacgagcaggttccatatggagcaagtagaaggggagctctgagttggtgaggaaggatgcgtggagtggggacttggagtaaaggatggaaaggtagatctctcctttttccctccattcccataaggatactggattaacaatgggggctatctgctcagcattccctctccaaattggagccagagaggggaaatgatgcaaatcagaggaggaaacacctcacagctcctctgtttctccatccaaggggatgccaatatccacgttgtagtctacaggctccccagagtcagccagggaataggggttcgattgaaaagaaggcctgttggaaaaggttttggt

SEQ ID NO: 118 - DNA, 449 bp, Homo sapiens
tttttttttttgctgatctagacttattaaatttatttcatgtcattgtggtcacttttacagctgtttagacttattttcaatcacattactcttcacagaattcacagaattcattaactaactagtatgttacatccaagggttcttagtagcacattgaaatagaaaagaggcccacgagttgttgcttgtgtgtggaacctgagtctgattacttagacagatgtctagaacattattgctttattaggcctatttttaaaaataataaattattcctaggaaacccaccctgccaggtgctcattctgcgactgctgtgggttcactcagaacatacctgactggtgggtgctgaatgaacctcccacccatgtaccctgctgctccggacgctctgagggctagagcaatgcccctccatggcgtgtaaacattttctacag

SEQ ID NO: 119 - DNA, 407 bp, Homo sapiens
ttttcatttttcttacttttaatatctaagataaaaaaaaaaacccaaccaccaaaacaacccatttgcatgtcggcgacacgctggtctcgggctccctttctggggctgtcctcccaggcggctcccaggtcctcatccagggaagagcccagcctcggccagaagccaccgcggcctccagttccgcaccgtgacaacctgggacccagcctttcagaaaggccaccaggaactgtttttaaagcatagggctgcactaggaggaagttttcccttgaggctgagagttatttcttgtggagaaatttcattttattgcctagtcccttcaggaacttattgacaccgctgtgctctccactggggagtgtttccagatactcttggggctcggacctcaaaca

SEQ ID NO: 120 - DNA, 328 bp, Homo sapiens
aatcgttgcgattaactttattaatattttaaaatatgaaaactgtaaaacatagtatttatgtaaacacctgaggactgttcaagtgggtacagcatcttcatacaaacaacttgaaagaagaccaagtttaagtaagaatcttatgacatgtaaggaataacataaatgaagctattctttaaatagttgcattcatgtctaaagtacatttggttttctaaaaagaaaatgtacattcttgcccctggtgaatattttattggcatttacaacaaatggctaatacttttataactgattctcatagcttataaacattacatca

SEQ ID NO: 121 - DNA, 329 bp, Homo sapiens
caaaaacagattctaacaagtacaaagaaataattaacaaaagctcatgtgtgcccaaaataaagatagagatgtaggcataaactctataccatggacaccttctatgagtcacgaaaatatcagtcatatatatactggcacttagtctggtacatgcaaatttcaaggcaattcctctccatctgagaacgaggaattgtgtcattttaaggccaaattgcagtccaattgccacaagtgcaaaaccaccccacataaccacctatttgtaatcatggaatgatagcctcaaccaaccaattgtgccatacatcattgttaagact

SEQ ID NO: 122 - DNA, 354 bp, Homo sapiens
tgctggggccacgtgggcatcctctttattggtgcttccaaggtgctggtgcagagcccttggctgaagggcctggactgtgggggagggtggcagccccagagacagcaggggagaggaagcgttctggcataaaaaaagagttcctgggtaaggctcctgtttccgagcattcgggcagcaaggggagtggcgcacacttctcagccgaagacactcttggtgggtccggctttgggcttctcaaagacagtctcggtacctgtgcgggtgcggctgaacaccgacggggcggccgagcagcttgctcacactctcgcatgacctggtaggtcttggacttgatttcctggt

SEQ ID NO: 123 - DNA, 292 bp, Homo sapiens
ttttgttgtttccaaagtcaatttattgaatattaagtcataaagccagtgatataattttaatgaaaaatatcctgtatcactcaagacttaaaagaacaaaaataccccttagaaacactgctttgaaaaataatcacattaactttacacacaacagagtcctttcttaagctttatttaagaaatcgagtactatatagttcaatatatataagacacatccagtattgtgttcctgatagcaagtgcatagattttgttaagatatcattttcactcaatagaaacg

SEQ ID NO: 124 - DNA, 235 bp, Homo sapiens
catgagatgatatttaatcttacaaaaggaataatgaatataaaaaataaaacaaggagttaccatttttcctctatcagaggccaaaaagttcgaaggcacaatgtttgcaagaatgtagggaaatggatatgctcagtttatgtacttttggcagttatgcacactggtgcaacttctttgactttataggcaatcataggcaaattttataaatgtacacaccctcttaaga

SEQ ID NO: 125 - DNA, 380 bp, Homo sapiens
tttttttttttttttttttaaaaacaaatctaggtatttatttaacacttaaaagagtacttactctgtgccaggaactattctaagcactttgcatatattaattcatttaattctcacatcagctctctttgctctccaagtcaatacattttcatctagagctgggattctaagccagacttcattaaccacccacatacccccttaaaaccacaatgctagattacctctcaatgagtgtaggaaatggatgtgatgaaagacagaaaaaagcatgaggcctaaatgtgtgaatggcttgaggaatgaatgctctgactgaagaaagaatgcctgagatccgcacactccttccactggcctgtagaggcagcagc

SEQ ID NO: 126 - DNA, 268 bp, Homo sapiens
aaaagaaaaatgttaagactttattcaagatgtgtatcaggcattataacaaaacagcagaacttcaacctttggaatactgtaattttacatccctttgatgcacagtccagtatactattttattacagatcattctatagggactacagacatgaactagaggaaatgtgcacagtcaaaatccagaatatcagctctgggagtgtacactgttagaggatgaagcacatcctttgccatttcaaatactgtgccaggtggagga

SEQ ID NO: 127 - DNA, 342 bp, Homo sapiens
ggaataatgtttatttaaagttacatttcagaggaaactatcttcaggagggcatgaagcctatattggctactgcaaaacaaccagaagttttataaaatatttctgatttaaattactaaggcactatagataggcacctatattacatacaatcttcaaacatttttaaaagttgaaactatgtattagttgatatctaaaatattaaagcccctgacaaactgaacggctaagaacttgacaaaatgagatgcctgtttcaatgattctgttgccagcatattaattaaaatacaatttgagattctaaattacacgatccagccttagtccagggac

SEQ ID NO: 128 - DNA, 330 bp, Homo sapiens
gaacgctggtgatggttcatgcaaaagattactatgcaaggagcaaaatctaagactgctgtttttcccaataaattcaattgttttccacaatgtagaattttaatcttcaaattaagtgtagctaggacagtgagtgaaactaatcactgcttgacttttattttcatctaggaaaaataacatctgatgtcaccacattaaaatgccttcctgcttaatatcagagaaaaaaatacatgttgccagtttagactcagcgcagtttatcatttggtccaaatttcatattcaaactacaaaaaatattttttaataaagaaaacatat

SEQ ID NO: 129 - DNA, 123 bp, Homo sapiens
caaaagtcaccaaggcaaaaaaagttgcaagcaatcttggttactgagaatagaagtgtagtgaaatactaagtactatccttggcttggggattaaacctatataacaaaagtgaaaagggg

SEQ ID NO: 130 - DNA, 400 bp, Homo sapiens
agacatggtagtttctatatttaaagaagagcgataagaaaccattaacgtttaatttatgattcgcacttgtcatgctaatttatatttttaaagatttacattattttgagtaagttctaatcctatgaaatgatgcagatgtcaccaacaacttaaattcaattctgatcttatactaatacataattctaaatatattactttgagtaatacatgtttacttagatttactatattaagtataggttttgtgaagtcgtaagtgtatacctatatagtttcttgctattcttgattttcataataatgaaggtcaaagtgcccttctgctccttcttgttctgggctctcatgagcattgtcaggatcatcgtgatcttcactttcatcatcatca

SEQ ID NO: 131 - DNA, 407 bp, Homo sapiens
aaaattaagacaagtttattgagtaaaaaaatgcatacattggaacggcaaaacatcaataaggccctaaaacaaaaaatacagttatgctttaacaaattcttagcaatgtggcccacgctttttaaaaaattgacgtgttggcagtgtttgttagaacactgacgtacatcccaaatagtaataaattcagtatgaaattatacgcataaccttactcaccatactactttttctcccaaactattgtgacttctttttgctctctgattaaaacaaacaggtaacatccttacacctttgctccatcccttgggctttaaaaagaatggctgtagttagttttgattcactatatactctctgtacttgaggaagagtaagctgtgtttaaaagtgcccttttc

SEQ ID NO: 132 - DNA, 408 bp, Homo sapiens
cagcaacaaaaacctgtatttaagcggctaattccagagatgagtagtggagagagcaaatgagcctggttagagctcactctgggaggagtatgtggacgacacttggctgtctcttcagggggccaggctgggccctagcactcccggcagtggaaaggcagagctggctgccagctctggcctccgcctgggattcactcccatcctggctcagatctgtggctgtgcttcacccagtgggtcctccctcaaggagccaggcgggatctggaagggtctgcttatccccaccacagaacgcagactgttgctgtagtaacagaggagaaactcatcttcagtggtagggatattgctgatgtcgatgtaaacctggttcagattgtcgctgcaggagaccttgct

SEQ ID NO: 133 - DNA, 445 bp, Homo sapiens
aacatttatttaaaaaactttattttgctttaaaaaaacaattattcaattcatgaagattaaccaaaatacaaaccccatcaaagtttattacaataatctttcataaaatagcattaaaaaaagttaatattttaatgtaaaaatcacaatgtaaaaataaaaactttagttttagtgactaaaataaaagcagataaataatcttcttcacagggaaaaaatacttgagggaaaaaacaatggtataacatgtgtaaagcaggaaatttaaatatcagcttagttcctcattgccaacatggcatttatatcccagatgagatttcgtaattgatccataatttgtttcagctgttgattcttctgtttgagttttttatttacttcagcaatttctcgcctctcttcactagcaaaacgaggtgggccagccgatcatcat

SEQ ID NO: 134 - DNA, 216 bp, Homo sapiens
  misc_feature: n=a,t,g or c
ttacttacacctttctattttttattttttacatcaaacaggtaatgtgatgatgctgtaacaaggtttgagggaagcatatctgacacatgagcatgaaaccaaatcaccatgcttatggactacaaaaggacctaagccttttaaactagactgtctcaactgtgcattaattatgtatttagatataggatatgtgcttgggaaaatgtataa

SEQ ID NO: 135 - DNA, 443 bp, Homo sapiens
  misc_feature: n=a,t,g or c
tgccactcaacccagtaagccatatgcagagccagtcaggtcagtgagagaggcatctnagagacggtcttcagattcctaccctctcgctcctgtcagagcacccagaacactgcagcctcaacattggacaacattttataaaccacatgctcccatcatcagtatcagggggaatgaggagaagccagcttcaccctcagcagcagtgcctcctggcacagatcacgatccccacggtctcgtggtgaagtcaatgccagacccagacaaagcatcagcttgtcctggggcaagcaactggtcaacctaaagaagacttttgagggagcttgggtttgcctgatgtggaatccaatgtgttcagaggaccaaggcttaaaacggattgcaaacagttttgaaggacctcggaggtggaatttccacaattttttttaggg

SEQ ID NO: 136 - DNA, 189 bp, Homo sapiens
  misc_feature: n=a,t,g or c
gttcagggcagcctcactggttgacataataacattttatnaaagataatacgnttttaaaaaatcaaatctgccaaacccggaccaccctggaattgctagcacgcctacagggattttnggttacagaaaggcatgcccaagattcaggagagcagagacatctgagcttgtaaatagaataaaagg

SEQ ID NO: 137 - DNA, 216 bp, Homo sapiens
  misc_feature: n=a,t,g or c
ccaagaggcgagtttattgggggaggggctggtcaagtcatcagtgcacactgcatccccgctaagggcaggtcagtccagtgtgtgggccgcgggggtcacaggcatagcagnaggagggggagtnanctacccccacgggnccaccccnagcccagtccaggggtnggagggagggggtgacccctgtcgaggtcctcaggcatctttggctga

SEQ ID NO: 138 - DNA, 291 bp, Homo sapiens
aaaggcatcgtgctgctcgaggagctgctgcccaaaggaggcaagaaggaacagcgggattacgtcttctacctggccgtggggaactaccggctcaaggaatacgagaaggccttaaagtacgtccgcgggttgctgcagacagagccccagaacaaccaggccaaggaactggagcggctcattgacaaggccatgaagaaagatggactcgtgggcatggccatcgtgggaggcatggccctgggtgtggcgggactggccggtctcatcggactttctgtgtccaag

SEQ ID NO: 139 - DNA, 419 bp, Homo sapiens
tttttttaaaattgaatcacttatttttttttaaagccctgcatagaaattcccaaggtatcaaaaacaaatgagagaagccttattcattacattagccaagaatgggtgtggacgtgaacattctggaagggtgacgctgatgacttgagaatgtctaaggcacactttgtgttctttgcaacatcccatgagcaagtacgcaggggactgtgtcctcgggattcaggggagctcttcctttccctggcatggccctgggtgcctggtgaccgatatgcagcacccctgggcagaactccgtctggattcagtgcacgccctgcttgggccagcacagctctcgtgcaaaagcacctttgcagcttctgatcgcatcgtcgagctctaggcacttgttcaggcctggcactgcagat

SEQ ID NO: 140 - DNA, 331 bp, Homo sapiens
tttttgaaaatgaacaaaataaagctttatttgaactccctcccctacagatcattcagatgcccgggaccatgtccaggttcctctcagcaacatggaaagctaagccatttcacaaacgcacaactgtagctacactacagccccccatgcccagggcacagctttgttgctaagcctgtaacaaaagaccaccactcagtatttgtgtaccctgcagccaacaccacctcctgggcttcacaggttcactcacccaagaggccagcacaaccacgaccgagtgggtactcagtggcccagacaccccccgaacactggcactgcacaa

SEQ ID NO: 141 - DNA, 460 bp, Homo sapiens
ttttgagtctcagattgaaatttaataagcatttgaagtgaagcagatagctctggtgataacgctttataggtttgcaacaaagcaaaacaaaacgaggcttagtgatgtgtcttggcactatttagataaagtccaggatgcaaacctgtggactggctgtcctgccatcctcaccaaaacccccaaccaggtaaagctgatcattccaaaggcaggtgcgatggcccatgcgtttcatcccacgatctgcacaggggaagtggaaccacaaaggaggagatgtgcgagtatcatagatgtagagatcattgcagatggtgtctctagctctggtcagagtttctccaccaaacagcacagcaaagggcccgaccacagaacatgagtgatgccgtagtccatggggccccttctgggaccctgcccactgctcacaagccttgcaagctgttccatc

SEQ ID NO: 142 - DNA, 464 bp, Homo sapiens
ccagtttgattcgtttattgacaaatcaaatgaaaaaaattcacttaaaagaagggtatgtgatcacaaatgtagctaacagggggaacgcatacagcaccagggagggagagtgaggctggacataccattacagagaggaggaagagaaagaatggcgcggggggcggaggaaagagagcacctgccaaaaatcccacactttccacttctcagctatcactcaatcatttttctggacagggttaacagctagaaatggtttaagggcaacatccaggtagtttgtctggaagatcagggagatgaagagttggagagaatgtcggtgtagcattttgaaggattctccagcttgaacctgttgccagaacccttttcatggtgaactgggagtcaggaagcttaatcctggtctcagctcagccatgaacttgctgtgtgactttgggtgaatcactttc

SEQ ID NO: 143 - DNA, 399 bp, Homo sapiens
cttttttttttttttgaatctctacaagtataatgtagatcaaaagaagctgacacaaaagattgcatattgattgattacatttatataaagtataaaaacagacaaaattaatctatggtattaaaagtcaggttgcctttgtaagggatagtgacaagagaagacttctgagatctggaaatgttctatttctttttctttttttcttttagagacagggtcttactctgttgcttaggctggagtacaggatgcaatggtgcaattgttttatttgttgatctggatggcatatgttcccatgcatgagtgtgtccacatgtgaaaattcactaagcttaccatttgtgtactttcctatatgtatactccaacaaaaaaaagtttgtataaatt

SEQ ID NO: 144 - DNA, 417 bp, Homo sapiens
attttttttttttttacaatataatctgttttattttacacttctctgattattgaaatctaaatagaggtttttgctaacaaacaaaaaggaaaataaaaagacagcaaggacacgattaaatgttgagtgcagatgaagggttgtatgaggccccatcctggggaggctgtacaccttcttggcacagcagcagtgtggcccacggagcttgaacctggtgaagacagcaagtaagccacagctcaagagttctgaggcttgggaacagaaaagagctccttcctgctccaccccaatctgggttgcatgggcatggaaaagagcaaacacaccctgcaaagcatactggacatgcctcttctttaccttctcaggccagaacaccctcctctccacaaacgtgtgcacacttgc

SEQ ID NO: 145 - DNA, 245 bp, Homo sapiens
gaaacaaactttaattcccaagccggacccttaagtcacaaggaacgtcagatccggctcactccctgacagggtgaattggaaactggcccctacttggtctctaaccccttccactgggtctagtggggactctgacgccgaacaggggctgtagatcagtgagtgtgtatgtgtgtgtggaggggcagcaggggccgctttccacgtggttacataagcacgtgttggggttgggccggtgt

SEQ ID NO: 146 - DNA, 361 bp, Homo sapiens
tttggggtagtatattaactttattttgaattattatataacatggaatatgtcatcaaagaatgaattaatgaaaaacgtttgtagttcagttaagcagatgatttgcataggaattgctagttttaagtcttaggatgcggacgtaactgaattgtcaattagattaacatagaataatcatttacatgtgtgcaaactaaaatgcaattttgaaaataacacacctttccgtacagtctttggtaggtgatgattcattttccctgctatgggtaatctcatctagatcaaatgtgatccttctaagctagacacctcttccctacagtaagaaggcctccatattgttcaagctact

SEQ ID NO: 147 - DNA, 440 bp, Homo sapiens
gcttataaatataatttattacctgtttaaaaattctttcttacattttgtacatgttggctgacagaataaatgcaggcaatttacaaaccaaggggactgcagggaaaatcaggattggcagccagggagagaaaagaggcacacccggagctggtatccctcacctccaccactcagcaaggcgccggacagatatccggaggcactctgcctctgccggggggtttttttagaaaaggaattgcatagaagatacagcaagagggaactccacaacaacaaaagtgttccatatcggaaaagccaaggttgtcatgttttgtttaaaaaagaaaaacgacaaagcacaaaacctcaatccgacctttctgcagttgaactgttccaaaggggacagtaggtggatgacactgcctcttcaacacgactgctgggga

SEQ ID NO: 148 - DNA, 281 bp, Homo sapiens
ttttcatgaatacatatatatttatttaattcataatatagcattttggatgggctggaatattgtagagagggatgaggctgtgtaatccacagatgctcatatttctgtcactaggagagacactattggtccagagctcccaatacaaacaggcgtggggtaaagcatttgataaaaaatagtccaacaatagtctaataaatagtctagccaataacaacaatacagcatatgtctgaagctggcagactacaccataaaaggcagttttgtctgac

SEQ ID NO: 149 - DNA, 396 bp, Homo sapiens
tttcagatcacgacaacaggtaacctttagtcagaactcaccacccactgtgttaagccttacatgacaatcaccatgaagatttacatacacatgttatatcatagtctcctcacaacatgtctaagaggtaggcacgtcattgttcccattttgcagatgaggaaactgaggttcagagagggcacttggcttgcccaaagtcacacagcagggagtggcagaggaagtcaggttgggtgaccccagtaactgctctcagaggctgggtgatgaccggcttcctggcttctctggaataaacctttgccaccacttcctgcatttcagcttcagtacaggcagagaatggggataggtgggggaatgaggtgagaggggagatgtttagaggtg

SEQ ID NO: 150 - DNA, 421 bp, Homo sapiens
agaaggaagatattcagggtttttatttttattttttgagtctgggtctcgctctgtcacccaggctggagtacagtggtgagatcatagcttactgtagcctcgacctcccgggctcaaagatcctcacacctcagccttccaagtagttgggactacaggcatatatcatcatgcctggctaaattaactattttattttaagagatgtggtctagctatgttacccaggctggtctcgaactcctggcttctagcaatcctcccacctcagtctcctgaatcactgggattacaggctggggcatcatgcccagctctaggtttttaaaatgtaggcaaggaggtcagcatttacacaaaagcagggtttgatcttaggaagcttaataaagagaggggtctaatcaaggtttcctgt

SEQ ID NO: 151 - DNA, 466 bp, Homo sapiens
ttttttttatactaaaataaggttatttacttcaaaatgatacattggacataatctgtatatagaacaaagcaagtaatggtaaactcttaaggcaccttttaaaccagatgctgtacaaaatacatttagtgtgttacacgtcaaagacgaatctatatttttggtgttttacaactgcctgataaaactgcttgcttttacccttctttcaatgcctatgtacagtttcccctaatgaagcaataatgatatttccattttatacaatatatactacattttagtttttaaatgggccaggacaaaggtcactaaaagggcttaaataattccatagaaaacagaatacagagcataagctaaaattacaatagttaatcctttacaagagccatattcacatactttccttatgggaccatcattacacgtggcttcacaggatgctgtgctggattttggt

SEQ ID NO: 152 - DNA, 318 bp, Homo sapiens
ttttttctgaaatcattcttttattttgcacacacatagctgctatttactgaacactggaaattcatgaatgcgttacatatttaaactttcatagaaggctcagatcaacaaagcaaaacttctacagataataagtagttgtgtatgcttgtcactcttgggcccatcagcacctgttccctatcatattgctgaactctgcaaactccagaaaggaaggtttcttttccaaacttcagagaagctgcagatcaagaatttgggccgttgcatctgattagaaactctcttcttccagtgtgagaacgttggatt

SEQ ID NO: 153 - DNA, 406 bp, Homo sapiens
tttttttttcggcatcttatttggttgtttttattgttctgtggcctcctcccacctgctaacatttaggcctcagcacatccggtggctacaactaggaatcacacattagtaagcaagttcatttccatttcctgaaggatgaatttatcttgggaacatttgagatgggtacatacctcccagagccagacttgggaggaatctgtcaaaaatatcaagatgctgagccttgtcttagaaaggggcttcagaaatgctttcatgggcggcggcttcttcccggggtaaaggtctcgtggagctgcagggccttgctcccaggatggtaaaacagggacccagagctgttaagtggctcccacaaagtcacccaaccaggctgggccaaactgggtttgatggc

SEQ ID NO: 154 - DNA, 397 bp, Homo sapiens
ttttctttcctataaaattttatttattacataaaaaattctatacatttgttagactaaaatacagttttcattataattctggcaactgagtcagtacacagagaaaacttagcattagatcagcacttttctttctagttcgtatttctgcacaagaaaaacatttcaaagctccgtttcatataggctgattgttctctgaagccagatggaattccatccaattcagagctcttggaagttaatttcccagcaagatttgataactccaactccagaaagttaattgcttaatatacatatttttaaagtcctctgagagcataatgctccatctgtaaagtctgcactgtgtcaataatgaccgtcacaaatactagggctacaactgtgt

SEQ ID NO: 155 - DNA, 336 bp, Homo sapiens
tttttttttttttatgtgaataaatacaaaagattttattttttcctcttaatttctttaaaatacatatcattatttaaagcagaaattgtaacttatgacaggacttacaatatttaaatatgtagatttaatatgtatgacaactacagcataaaagacaggtatgataaatggatgtacatacttacaagatttctacattttatgtgaagtggcacatcaactctaggtagactgaaaaattaagaatgtatattgtaatcactagaacatccaacttaaaaaaattattaaaacagtatagctaaagagccaataaattaaaatacaatt

SEQ ID NO: 156 - DNA, 381 bp, Homo sapiens
ggggttgaagagtttatttattgctctgcccccttggcacagcaagcccaggctctaccagcaacgatagtcgggataggtctcagacacaaactcaggatggataacatagttgtttctctggggaccaccagacttcttgaagtgacttgtgtcccatctaaggttcggatatgggtagtatgacggcgggggagttgtaacagcacactgcattccgggccggtgctcgtagggaggtacacatagtcggttgctcccggcaccaaggccgcacgtgcggtcaggtgcagggcgccccgctggcagtagtagtccatcccgcgcagacagtagtggcggcccgagcaagcactttcgtaaccatggaagggcaggcgg

SEQ ID NO: 157 - DNA, 195 bp, Homo sapiens
atttttaccatgtgcgtattcaaccaaatttatttttgaacattcagaacaccagattatcacagattaaaaagaaagcaccaaaaattactacacattaatacctgagcagagactgaaggcaaatattcatctattaaacctacaccataatgctcaaacacaggtaaaaacattcacaacacactctacaga

SEQ ID NO: 158 - DNA, 277 bp, Homo sapiens
ttacaaatattttagcaaatgctttctatttctcttgcttgtgcatatcttggctggcgttacagaaaaatagtgtaaacattatttccttactggggaatgagggttttttctttttctttttttcttttttttttttttttttttagtttgtgtgtgggggtgggtaagggaggggatggtttatgttgaatgtttagtttttcttctgcatgatacgtcatgttgtgggatctttagaaaacttcatactgtatgaataagaaaataaaatatt

SEQ ID NO: 159 - DNA, 342 bp, Homo sapiens
tttgaccaaagtcggtgctgcacttgacgcagtgtgttttaggtgtttgtctttgtacttttttgtgatttttgaatgcacgtgcgcaggaagggctcctcttagagaagcagtcaaactgtgaagcactaagctgaccctgcttcaagcaattttgtttttacaactgttcctttcacaagcaagccttaaaaaaaaagaaagacaacttcctttttcttcagctcccacaccccatttttcttagcagactgcagtcaatccacattcaatgaaaagtatataatgcccatttttatatgcacgtttttaaacttccaagttctgaaaattgtttactgg

SEQ ID NO: 160 - DNA, 438 bp, Homo sapiens
tttttgccacgcaattctgaataaagtttattaaataatatgtacagcaaatgtagtaattcaacacatctatttatcaaatcaatccactgcaatgaagaaaaataaatgaacagaaaaatctatgtctgcataggacatgctctcagtgtgtaatttaaatggcaatactttaaattaattggttatatataatgtcagttatttttctttcagaatataaccttttttgtagtaacctattctagcaataggacttaatacgactgcagataaataggactgcaaaaaccaaaaacccaaaataatgaaattaaaaaggaaaaaaaaactgtaactgagatcagagttacctttcctccccaatagaatacttatcgtaaattttaacactttacaatggctatttttgtgctaaaaatctgtaggtgagttatt

SEQ ID NO: 161 - DNA, 395 bp, Homo sapiens
tttttttttgtagaaaattcctttattatagtgcaaattactttcagcagtgacataatgtaacaacacatttagcaacattttacaccacacagtaaataagaaagtgtttctttgaaaatatgtcatcataggaacattatttctacattaatgccagaaaatgccaaggccgtttatctcaaggcaaacagggctccctccttccttttgggtattttctttttaacacaaatgaaatgacttgccattttaacaaatcctcaattctaaaagtgatctctcagggggctttgaactaaggtcggcaagatttgaaatggggcttcaaaattttaaataataattttaaaatacttctggaatagcccaaaaagtagaagtcacttctatta

SEQ ID NO: 162 - DNA, 323 bp, Homo sapiens
ttttttacagtcacatgaaaaataaacatctttatttttttgcctactttatttcattttttcaaataaaatttaaatctgtacaaagtatactgttacagtatatattttgtaagaatcaatgcctaaaataatcacaatacttcaataagcagtacagcagacctcgctagttttcagctttgatattgaacaaactcaagccggctgatgcacaacacgtttgcttggtttccacatggtgatttcccagcactgagatgggagaacatgacagcaaatatggtaatattacagcccgacacactgcgtttcttcatgtg

SEQ ID NO: 163 - DNA, 378 bp, Homo sapiens
tttttttccagcaaaaaaatacggctttattggatctatttcctaactacaaagacagctgacacagacatcaaacgtttccttttcaatgacagtcccctgagaaaggctgcacgtgactcctacagtgccgggtgcagggtacccagccgcaggtgggacgcggccacacgtcttcacggttacgtgcagaccgacgggatggccttcaggttgtttctttccgtgagtgagacacaagagacgcgattgtgccggagcgcacggtacaggccgttccttctgcgggaccctttctccatcagcgacgttctgttcagtgacttcacagccggagcctccacccgcagtgcaattcaggcaggttccataaggggg

SEQ ID NO: 164 - DNA, 586 bp, Homo sapiens
agaataaaccaggcctgtttcttttcccctgaaatccctgcctctggttcctaaacccatcatctaaggtgacagagcagtgctggaatagcatctcctttcactttcccaaaactgccacagatagctgccactggatgctctttgattcctggaagcaaacgtgggactgtcggaggaaagggattgttctggtcttactcataactgggtggtttgagggtgactgaagtcgtgcttttcctgtgtgtgctgccagcacagggctgtaaatgcagatattgcgcctgtgtgcgtgtgtataagtcaagctccaagaggctcctgaatgtgactggcgtgctgagaatgtgtttacgctgtttaatgtctgccaggtgagggttacactgaagatgcacaatccctaaaataaagatcaccacttccccaaagaagcagccctcgggtccatgtgttgttcagacatgtgaagagaagcaagacagagggtctcagatggacgagggctctccaagggaatgcctggggattcacccagtggtccccagaggtgctccatggaggcaacaagtcattccatgaa

SEQ ID NO: 165 - DNA, 328 bp, Homo sapiens
cacttgacaattttatgattaaaaccaacaaatggaaaacagacagtgttgggtgttgctgacataatcaagcatttcgtgcggacccactcaaccaccccatttcttggatctatttctggatgtaccaaatgtgtctgaagatgaactcactttcgcacatcaaagatgtatccagtgttaaacaccggagccagaacccaggtgaaaatctgctggttcagggcaacaccacttccggctttattaaacactcaaaagtcaggttcccaagaaacgcttggatctatgcgcaagtataacatgtcaaaactgttaaatgtgacca

SEQ ID NO: 166 - DNA, 495 bp, Homo sapiens
ggatttgcaaatattttaattcacagaaactcaaggagagggtgggggtgggggctggggtggtgtgttgccgcccttctgtctttatccaggccttctccagcccccgtaagtggcaacagcattctagagacatgcagtggtgtgctagtaccatacacacaacacaaacgacacagccagcaacagtggctgggctggttggtggggggcctctggacctccaagtctcaggctctgtcacagagcagggcaggtctggtccgctcacagggtcctcacagccacgggatagaggagggacaagtgctcagcccctttgatgggtagctttctggtggtgtagtagtggatgacttccgggacactgtcgaacggagggctgttctgacccagaacgtatttctctttggttttggccagtttcatgtgcataaaaccctggttgctcctcagggagagggagtagtcatgcttgctggtctgggctgtccg

SEQ ID NO: 167 - DNA, 378 bp, Homo sapiens
tttttttttttttttttggtcatactacatttcactttattattattaacatttatcatacatggttactattccaatctttcatgcagacaaaaataaacaatataaaatacataatgcactttgataattttaaccatacataaaatatggagtaatggaagctatgttacatggatattttacaaaggaaaaaaagatgacttttataataacacatccagatgaaatttatcattaaattttggatttcatatgatgttaagtatggatatattcaaaacaattactatttatagaaccaatttgatattttgtcatttaaaataatgaatactatgtaaatgagtacttataaaaatatttttaggcaaaaag

SEQ ID NO: 168 - DNA, 365 bp, Homo sapiens
tttttttttttttcacgttttacatgtacagagtttatttgttgtttttacttaaaaagatacccaactgaaatattactaatgattaaaaacaaattcagagttaattacaaattcagttgaaacaaaatttcagtttggattaaatttacactgtgaattacaatgaagtgtcactcaattgcaaaatgatttccattcatacagcattttgtttttcataaattttgacctctgaccaaagaaaacacagctttttgggtaacattcatgaaaacattgaagcctataatataaatttttattaccactttcaatagtcattaatataaaaagttaacaaatttaaacaacaaagtttaagc

SEQ ID NO: 169 - DNA, 306 bp, Homo sapiens
acttgagaagtcaaacagttttattacagaactatgtgtatatattttgggtttaaaacttgccaatagctgtttgaaaggatagctcataatttattcaaatagatattttattaatcaaatgtttttggtttatcaacataaccaaatgtataaaaaatgtttttaaatacaagacataactataaagtcatgaggctgattgaccttttaaactaacataataaaatctatatggtcaaaatgagtggtgatgctttaaggtaatgattatgcgtcccatctaaggatgctgcaatggcctag

SEQ ID NO: 170 - DNA, 190 bp, Homo sapiens
tgggcaccattaatacctaggacaggtgaaagggtccagaaagacaccattggtaatggccgattgccggctgcagtcatcgcccccagatcaggctggtacaggatgccttaaggtgatgagaggtgagggtgcatgaagaataatgagcacagggaagagagaagcaggacaaagtagcagataaaat

SEQ ID NO: 171 - DNA, 288 bp, Homo sapiens
tttcatgctttttatttttcggtttatttaatcttctttaacacagccattgttggttcaacaatccaatatttgaggttacattattgcaaaaataaggacatagctgaataggttatgccatcaatatgtttgttaatcctatcccttttattaaagacaaagcacagtttgttaatattgtcttggattaactctatttgtaaggttacttatagtggttcatactaaaggcaggggatttgcttcctgggccaattgtctttaaactataatttaagaaatcat

SEQ ID NO: 172 - DNA, 208 bp, Homo sapiens
ttttatttttttttttttttagagtttgattgcctttattatgaatataaaatgtacatacaatacaatatacatttatacatttacagtttgcatttcctttcatcttttttgagcaaattcaattctgcatgtcccagtttgccgctccttccactgatttgcacttacactcatgacgttctcttcacttgggtactctgtgtac

SEQ ID NO: 173 - DNA, 360 bp, Homo sapiens
ttctgtgcaaatgctttaattggtggattcttagatacagtggttaatccattgcccacaattctttactaattccgaggcacctcatgccgggaacacactttcccttccactaaacaaaggtgaccgcgtttcagagctctcctcttacaaggttcacgtccttcgttaggccgaggaccgtggtactacaaaagaacatttcgttagctgaagtcactacgattggcgagaaacatccgttacttcagaatacgttaactacaaaatatattgaatttccatatgtattaaccatatacatgtgtaactattactaaatgtagttcagtcattacaaaataagacattctgggagcg

SEQ ID NO: 174 - DNA, 155 bp, Homo sapiens
ttttttttttttttttttttttttttttttttttttttagccacaaaacattttatttacaaaatatatactgaatactatacatctggccccatcaccatggaaacaactccaaagcctgcctggggatttgtgcccaagcccagcccaggagg

SEQ ID NO: 175 - DNA, 385 bp, Homo sapiens
tttttttttttttttttttttaagtttgtctggtttatttgcaggctgttagagatgatatcccagtccacgcacactcccatgcacacgcacacacatacttcatccacctgaatttgcccgacaaaccctcctctgagtcatagggacaaagccatacttggcagtcctcacgttactggttacattagatttggtctttcagaaagaagatggttgaagtcccaagaagctgagcccttagccagagaagtaagagtcctagaaccaagagccacaacctgaaaagatgcagattgcccccgccttccttccagggacaactcttgagaccctctcctcccaggagttgagtctcaagaaatgaagggactgatggggtttc

SEQ ID NO: 176 - DNA, 311 bp, Homo sapiens
tttctccagggagttttatttcctcagcagctgtttctcccatgcctgggcttgtgctaatgtggggcctgggcggacgtggggtcgggtgggcatctccctcagactgggcaacctcaggtgccccagccgagttcctgcagcccgctttggccccaggcagtcctggagagggtctggctgttttctttgcctgctggtgacgtgatagcagcccctgcctcatggcctgcatgtgggccggctgggctgtgctgaggcaggttctagaacagtgatctgatagcatccaaggcagaccatgtgggtga

SEQ ID NO: 177 - DNA, 373 bp, Homo sapiens
tttttgtttttttttttgacccagaaaagcactttaatttttttttcttggaggcataatttagtcatctcacctaaagcacttttcactttatctctggcaaccaagggttacagaaaactcagcaccaaaggatgaaaggggaacttgtccccttcggtccccagccctgccctcccctgcagcctaaaataccctttctatgatcacagaacaaagttcacactcaccacacagccattctcacacacactcgcacaaaaagaaaaccaaagcccactaaagcacatggggaaaaaaagattacaaaacatcttcctccccatccggccttgagaccagactccctggctggagaggtcgtgacttccgc

SEQ ID NO: 178 - DNA, 6651 bp, Homo sapiens
ggccgagtcgtggcgggagacggtgcagctgtacgaggacgaggtgcgcgagctggaggaggcgctgcggcgcggccaggagagcagactccaggcggaggaagagacgcggctgtgcgcgcaggaggcagaggcgctgcggcgcgaggcgctcgggttggagcagctgcgcgcgcggctggaggacgcgctgctgcggatgcgcgaggagtacgggatacaggccgaggagcggcagagagcgattgactgcctggaggatgagaaggcaaccctcaccttggccatggctgactggctgcgggactatcaggacctcctgcaggtgaagaccggcctcagtctggaggtggcgacctaccgggccttattggaaggagaaagtaatccagagatagtgatctgggctgagcacgttgaaaacatgccgtcagaattcagaaacaaatcctatcactataccgactcactactacagagggaaaatgaatggaatctattttcaaggcagaaagcacctttggcaagtttcaatcacagctcggcactgtattctaacctgtcagggcaccgtggatctcagacgggcacatctattggaggtgatgccagaagaggcttcttgggctcgggatattcttcctcggccactacccagcaggaaaactcatacggaaaagccgtcagcagtcaaaccaacgtcagaactttctctccaacctatggccttttaagaaatactgaggctcaagtgaaaacattccctgacagaccaaaagccggagatacaagggaggtccccgtttacataagtgaagattccacaattgcccgcgagtcgtaccgggatcgccgagacaaggtggcagcaggtgcttcggaaagcacacggtcaaatgagaggaccgtcattctgggaaagaaaacagaagtgaaagccacgagggagcaagaaagaaacagaccagaaaccatccgaacaaagccagaagagaaaatgttcgattctaaagagaaggcttctgaggagagaaacctaagatgggaagaattgacaaagttagataaggaagcgagacagagagaaagccagcagatgaaggagaaggctaaggagaaggactcaccgaaggagaagagtgtgcgagagagagaggtgccgattagtctagaagtatcccaggacagaagagcagaggtgtccccgaaaggtttgcagacgcctgtgaaggatgctggtggtgggaccggtagagaggcagaagcaagagagctacggttcaggttgggcaccagtgatgccactggttctctgcaaggcgattccatgacagaaaccgtagcagaaaacatcgttaccagtatcctgaagcagttcactcagtctccagagacagaagcatctgctgattcttttccagacacaaaagtcacttacgtggacaggaaagagcttcctggggaaaggaaaacaaagactgaaatagttgtggagtctaaactgactgaggatgttgatgtttccgatgaagctggcctggactaccttttaagcaaggatattaaggaagtggggctgaaaggcaagtcagccgagcagatgataggagacatcatcaacctcggcctgaaagggagggaggggagagcaaaggtcgtcaacgtggagatcgtggaggagcccgtgagttatgtcagcggggagaagccggaggagttttccgtcccattcaaagtggaggaggtcgaagatgtgtcgccaggcccctgggggttggttaaggaggaggaaggttatggagaaagcgatgtcacattctcagttaatcagcatcgaaggaccaagcagccccaggagaacacgactcacgtggaagaagtgacagaggcaggtgattcagagggcgagcagagttattttgtgtccactccagatgaacaccccggggggcacgacagagatgacggctcggtgtacgggcagatccacatcgaggaggaatccaccatcaggtactcttggcaggatgaaatcgtgcaggggactcgaaggaggacacagaaggacggtgcagtgggcgagaaggttgtgaagcccttggatgtcccagcgccctctctggagggggacctgggttccactcactggaaagaacaagctagaagcggtgaatttcatgccgaacccacagtcattgaaaaagaaattaaaataccccacgaattccacacctccatgaagggcatctcctccaaggagccccggcagcagctggtggaggtcatcgggcagctggaggaaacccttcccgagcgcatgagggaggagctgtccgccctcaccagagaggggcagggtgggccggggagcgtttccgtggatgtcaagaaggtccagggtgctggtggcagttccgtgaccctggttgctgaagtcaacgtctcacaaactgtggatgccgatcggttagacctggaggagctgagcaaagatgaggccagtgagatggagaaggctgtggagtcggtggttcgggagagcctgagcaggcaacgcagcccagcgcctggcagcccagatgaggaaggtggagcggaggccccggctgctggcattcgcttcaggcgttgggccacccgggagctgtacatcccttcaggcgagagcgaggttgctggtggggcctctcacagctcgggacagcgcactccccagggcccagtgtcggccactgtggaggtcagcagccccacaggctttgcccagtcacaggtgctggaggatgtgagccaggctgcaaggcacataaaactcggcccctctgaagtctggaggactgagcgaatgtcatatgaaggacccactgcagaagtggtggaggtaagtgcgggaggtgacctaagtcaggcagcgagcccgaccggagccagccggtctgtgaggcatgtcacgctgggtcccggtcaaagtccactgtccagagaagtcatcttcctaggccctgcccctgcctgtccagaggcatggggctcgccagaacctggcccagcagagtcttctgcagatatggacggatcagggaggcacagcacatttggctgcagacaatttcatgctgaaaaggagattatttttcagggccccatttctgctgcagggaaggttggtgattattttgcaacagaagagtcagtgggtacccagacttctgtcaggcaactccagttaggccctaaagaagggttcagtgggcaaatccagttcacagctccactttcagacaaggtggagttgggtgtcataggagattctgtacacatggaagggttgccagggagcagcacatccatcaggcacatcagcattgggcctcagaggcatcagaccacccagcagatagtttaccatgggctggttccccaactgggggaatctggtgactcagagagcactgtgcacggagagggctcagcagatgtgcaccaggccactcacagtcatacctcgggtagacaaaccgttatgactgaaaagagcaccttccaaagtgtcgtttctgaatctccccaggaggatagtgcaggggacacatcaggggcagaaatgacatcgggtgttagcagatcctttaggcacattcgactaggtcctacagaaacggaaacctctgaacacattgccatccgtggacccgtgtccagaacatttgtgcttgctggttcagcggactcccctgagctaggcaagttagcagacagcagcagaacgctaaggcacattgcaccagggcccaaagaaacttcgtttacctttcagatggatgtgagtaacgtagaggcgatccgcagccggacacaggaagcgggagctctcggtgtgtctgaccgtggttcctggagagacgcggacagtaggaatgaccaggcagttggtgtgagctttaaggcctctgctggggaaggagaccaggcccacagagaacagggcaaggagcaggccatgtttgataagaaggtgcagctccagagaatggtagaccaaaggtcggtgatttcagatgaaaagaaagttgccctcctctatctagacaatgaggaggaggagaatgatgggcattggttttaataagcagaaacattttgttttaatggcagcctgttggcgacgtgccaacatccaaaggccttaacttattttaagaggccgagggagtctatgaaaatctccccttttttacttttttaaagagtactcccggcatggtcaatttcctttatagttaatccgtaaaggtttccagttaattcatgccttaaaaggcactgcaattttatttttgagttgggacttttacaaaacacttttttccctggagtcttctctccacttctggagatgaatttctatgttttgcacctggtcacagacatggcttgcatctgtttgaaactacaattaattatagatgtcaaaacattaaccagattaaagtaatatatttaagagtaaattttgcttgcatgtgctaatatgaaataacagactaacattttaggggaaaaataaatacaatttagactctaaaaagtcttttcaaaaagaaatgggaaataggcagactgtttatgttaaaaaaattcttgctaaatgatttcatctttaggaaaaaattacttgccatatagagctaaattcatcttaagacttgaatgaattgctttctatgtacagaactttaaacaatatagtatttatggcgaggacagctgtagtctgttgtgatatttcacattctatttgcacaggttccctggcactggtagggtagatgattattgggaatcgcttacagtaccatttcattttttggcactaggtcattaagtagcacacagtctgaatgcccttttctggagtggccagttcctatcagactgtgcagacttgcgcttctctgcaccttatcccttagcacccaaacatttaatttcactggtgggaggtagaccttgaagacaatgaagagaatgccgatactcagactgcagctggaccggcaagctggctgtgtacaggaaaattggaagcacacagtggactgtgcctcttaaagatgcctttcccaaccctccattcatgggatgcaggtctttctgagctcaagggtgaaagatgaatacaataacaaccatgaacccacctcacggaagctttttttgcactttgaacagaagtcattgcagttggggtgttttgtccagggaaacagtttattaaatagaaggatgttttggggaaggaactggatatctctcctgcagcccagcaccgagatacccaggacgggcctggggggcgagaaaggcccccatgctcatgggccgcggagtgtggacctgtagataggcaccaccgagtttaagatactgggatgagcatgcttcattggattcattttattttacacgtcagtattgttttaaagtttctgtctgtaaagtgtagcatcatatataaaaagagtttcgctagcagcgcattttttttagttcaggctagcttctttcacataatgctgtctcagctgtatttccagtaacacagcatcatcacactgactgtggcgcactggggaataacagtctgagctagcaccaccctcagccaggctacaacgacagcactggagggtcttccctctcagattcacctggaggccctcagacccccagggtgcacgtctccccaggtcctgggagtggctaccgcaggtagtttctggagagcacgttttcttcattgataagtggaggagaaatgcagcacagctttcaagatactattttaaaaacaccatgaatcagatagggaaagaaagttgattggaatggcaagtttaaacctttgttgtccatctgccaaatgaactagtgattgtcagactggtatggaggtgactgctttgtaaggttttgtcgtttctaatacagacagagatgtgctgattttgttttagctgtaacaggtaatggtttttggatagatgattgactggtgagaatttggtcaaggtgacagcctcctgtctgatgacaggacagactggtggtgaggagtctaagtgggctcagtttgatgtcagtgtctgggctcatgacttgtaaatggaagctgatgtgaacaggtaattaatattatgacccacttctatttactttgggaaatatcttggatcttaattatcatctgcaagtttcaagaagtattctgccaaaagtatttacaagtatggactcatgagctattgttggttgctaaatgtgaatcacgcgggagtgagtgtgcccttcacactgtgacattgtgacattgtgacaagctccatgtcctttaaaatcagtcactctgcacacaagagaaatcaacttcgtggttggatggggccggaacacaaccagtctttttgtatttattgttactgagacaaaacagtactcactgagtgtttttcagtttcctactggtggttttgatattgtttgtttaagatgtatatttagaatgacatcatctaagaagctgattttgctaaactcctgttccctacaatgggaaatgtcacaagaatgtgcaaaaataaaaatctgagg

SEQ ID NO: 179 - DNA, 1364 bp, Homo sapiens
aggggactggggccaagagccgggagcgcgggcgcaaaggcaccagggcccgcccagggcgccgcgcagcacggccttgggggttctgcgggccttcgggtgcgcgtctcgcctctagccatggggtccgcagcgttggagatcctgggcctggtgctgtgcctggtgggctgggggggtctgatcctggcgtgcgggctgcccatgtggcaggtgaccgccttcctggaccacaacatcgtgacggcgcagaccacctggaagggcctgtggatgtcgtgcgtggtgcagagcaccgggcacatgcagtgcaaagtgtacgactcggtgctggctctgagcaccgaggtgcaggcggcgcgggcgctcaccgtgagcgccgtgctgctggcgttcgttgcgctcttcgtgaccctggcgggcgcgcagtgcaccacctgcgtggccccgggcccggccaaggcgcgtgtggccctcacgggaggcgtgctctacctgttttgcgggctgctggcgctcgtgccactctgctggttcgccaacattgtcgtccgcgagttttacgacccgtctgtgcccgtgtcgcagaagtacgagctgggcgcagcgctgtacatcggctgggcggccaccgcgctgctcatggtaggcggctgcctcttgtgctgcggcgcctgggtctgcaccggccgtcccgacctcagcttccccgtgaagtactcagcgccgcggcggcccacggccaccggcgactacgacaagaagaactacgtctgagggcgctgggcacggccgggcccctcctgccagccacgcctgcgaggcgttggataagcctggggagccccgcatggaccgcggcttccgccgggtagcgcggcgcgcaggctcctcggaacgtccggctctgcgccccgacgcggctcctggatccgctcctgcctgcgcccgcagctgaccttctcctgccactagcccggccctgcccttaacagacggaatgaagtttccttttctgtgcgcggcgctgtttccataggcagagcgggtgtcagactgaggatttcgcttcccctccaagacgctgggggtcttggctgctgccttacttcccagaggctcctgctgacttcggaggggcggatgcagagcccggggcccccaccggaagatgtgtacagctggtctttactccatcggcaggcccgagcccagggaccagtgacttggcctggacctcccggtctcactccagcatctccccaggcaaggcttgtgggcaccggagcttgagagagggcgggagtgggaaggctaagaatctgcttagtaaatggtttgaactctcaaaaaaaaaaaaaaaa

SEQ ID NO: 180 - DNA, 393 bp, Homo sapiens
  misc_feature: n=a,t,g or c
gatcccagtgacgtggaagtcatcagaaccccacggtacttggagtacctctctgcaccaagatagctggctgattttntgctcagtcacaattttacttgaaagcaaganttgtcctagctccttttccattattccaaaacgtttaacgttcaaagcagggtctcattaaaaaagaaactactggttgatataatngagatattacaatttcagaataaacatttgattaaaaataaggaaatcctcagttcatactgtatttaaaagaganttggtaacttgantgtgtgtaattttttggaacctgtctaaaaaccanatacccctgcaancngatacagcccncccnnttctntttanntnttttgctgtgttattngntnggagntt

SEQ ID NO: 181 - DNA, 444 bp, Homo sapiens
caaatgtatgamcttgtttaagatagccaggmaggcagtggtaggataaacacaagggataggmatgtatcaaaaaacagattaacacacacgcacgcccgcacacacacacacacacacacacaaaacctgtacaaaatgctccaatcaatgagaacagaaaaaagaaatcttcaactatgttacagtttaaaagcagaaaaaaaaagttagggagtttctccctcccacatgtcaggaaatgtcatccaatattcttaaagcaaggataactaaataaaatacatgtscagcatattctgcaattccgttacatacagtagttttttttccaaagctatttttttttagtatcgttaatataaagcagttgcacaaaaagcaarggtgttttgcaaacaggtgtatgcatttttcctttttaggacawtatctaamaaagmc

SEQ ID NO: 182 - DNA, 440 bp, Homo sapiens
  misc_feature: n=a,t,g or c
gatcccaaactgttccctttttcatttcttgaaatgttaccactacagacattttttnaaggtgaataaacagttgtnatgtgctgtacctaaaatcatgtttaatcgtataaggaaacatttcaatacacttatacaggaagaaaactatagatgaagtacatgtgtgtgattcagtctgattcacagaattctgagagtaatatggaataaaacaactccacttagatgataactgaagcatttcctgccttgtgaaaatttggnttttaaattgctgttagaatgggnaatttggacactttatatcattgtatanttncagactttagnttctgtatctnttgggaaccatggttatagcaaaaccnttggnaataatcctgtttccnanaccnccctnnatgtaaacctggtatgcttggctggtaacncctaag

SEQ ID NO: 183 - DNA, 187 bp, Homo sapiens
  misc_feature: n=a,t,g or c
gatccaatactatttagtttattattgaaattggaaggattcattgagcagcatagaagtttgtttacatgttactttgagatgctaggtatttgtggaattaaaaagaatcaggctcttttgtactnantttttaaatctgtgatgcttntcaaatttaattcataataaattgatgcaatttcat

SEQ ID NO: 184 - DNA, 1971 bp, Homo sapiens
gtgatggatctcatcccaaacttggccgtggaaacctggcttctcctggctgtcagcctgatactcctctatctatatggaacccgtacacatggactttttaagaagcttggaattccagggcccacacctctgccttttttgggaaatgctttgtccttccgtaagggctattggacgtttgacatggaatgttataaaaagtatagaaaagtctggggtatttatgactgtcaacagcctatgctggctatcacagatcccgacatgatcaaaacagtgctagtgaaagaatgttattctgtcttcacaaaccggaggcctttcgggccagtgggatttatgaaaaatgccatctctatagctgaggatgaagaatggaagagaatacgatcattgctgtctccaacattcaccagcggaaaactcaaggagatggtccctatcattgcccagtatggagatgtgttggtgagaaatctgaggcgggaagcagagacaggcaagcctgtcaccttgaaacacgtctttggggcctacagcatggatgtgatcactagcacatcatttggagtgagcatcgactctctcaacaatccacaagacccctttgtggaaaacaccaagaagcttttaagatttaatccattagatccattcgttctctcaataaaagtctttccattccttaccccaattcttgaagcattaaatatcactgtgtttccaagaaaagttataagttttctaacaaaatctgtaaaacagataaaagaaggtcgcctcaaagagacacaaaagcaccgagtggatttccttcagctgatgattgactctcagaattcaaaagactctgagacccacaaagctctgtctgatctggagctcatggcccaatcaattatctttatttttgctggctatgaaaccacgagcagtgttctctccttcattatatatgaactggccactcaccctgatgtccagcagaaagtgcagaaggaaattgatacagttttacccaataaggcaccacccacctatgatactgtgctacagttggagtatcttgacatggtggtgaatgaaacactcagattattcccagttgctatgagacttgagagggtctgcaaaaaagatgttgaaatcaatgggatgtttattcccaaaggggtggtggtgatgattccaagctatgttcttcatcatgacccaaagtactggacagagcctgagaagttcctccctgaaaggttcagtaaaaagaacaaggacaacatagatccttacatatacacaccctttggaagtggacccagaaactgcattggcatgaggtttgctctcgtgaacatgaaacttgctctagtcagagtccttcagaacttctccttcaaaccttgtaaagaaacacagatccccctgaaattacgctttggaggacttcttctaacagaaaaacccattgttctaaaggctgagtcaagggatgagaccgtaagtggagcctgatttccctaaggacttctggtttgctctttaagaaagctgtgccccagaacaccagagacctcaaattactttacaaatagaaccctgaaatgaagacgggcttcatccaatgtgctgcataaataatcagggattctgtacgtgcattgtgctctctcatggtctgtatagagtgttatacttggtaatatagaggagatgaccaaatcagtgctggggaagtagatttggcttctctgcttctcataggactatctccaccacccccagttagcaccattaactcctcctgagctctgataacataattaacatttctcaataatttcaaccacaatcattaataaaaataggaattattttgatggctctaacagtgacatttatatcatgtgttatatctgtagtattctatagtaagctttatattaagcaaatcaataaaaacctctttac

SEQ ID NO: 185 - DNA, 419 bp, Homo sapiens
ctcttgacgactccacagataccccgaagccatggcaagcaagggcttgcaggacctgaagcaacaggtggaggggaccgcccaggaagccgtgtcagcggccggagcggcagctcagcaagtggtggaccaggccacagaggcggggcagaaagccatggaccagctggccaagaccacccaggaaaccatcgacaagactgctaaccaggcctctgacaccttctctgggatcgggaaaaaattcggcctcctgaaatgacagcagggagacttgggtcggcctcctgaaatgatagcagggagacttgggtgaccccccttccaggcgccatctagcacagcctggccctgatctccgggcagccaccacctcctcggtctgccccctcattaaaattcacgttcccaccctgaaa

SEQ ID NO: 186 - DNA, 1021 bp, Homo sapiens
aaatgaaaaaaaataatagttcactcaaacacaacttccgggttgaaggttcaacgattctcctcctcacctccaagtactgggactacagacatgcaccacacacccagctaattctgcatttttagtagagaaggggtctcaccatgttgcccaggatggtctggatctcctgaccttatggtccgctcgcctcggcctcccaaagtcctgggattacaggtgtgacccaccgcgcctggcccaaagtgctgggatgacaggcgtgagacaccatcctgccccacagaaaagatctgagatgggacagcccccgcagatcaggacgtgggctctgttatctggggggtgaccgactcaccctgcctcctctcgtctctgcaggtggtctgggaggcgggcaaagccggcctggaggagtgtctggtgactgaagtacaggtcgtgcagaaaacttgagactggggttcagggcttgtgggggtctgcctcaatctccctggccgggccaggcgcctgcacagactggctgctggacctgcgcacgcagcccaggaatggacattcctaacgggtggtgggcatgggagatgcctgtgtaatttcgtccgaagctgccaggaagaagaacagaactttgtgtgtttatttcatgataaagtgatttttttttttttaacccactcactggtcccggtctctggattcagccccattcctccaacactactagagagactgtttccccggttttttttttggggagatggagtcacgatctgtctcccaggttggagtgcagtgatgcaatctcagctcactgcaaccgctgcctcccgggctcaagcaattctcctgcctcagcctcccaagtaggtgggattacaggcacctgccaccacccctggctaatttttatattagcggtctcgaactcctgaccttgtgatctgcccgcctctgcctcccaagtgctgggattacaggggtgagccaccacacctggccttttttctttaaa

SEQ ID NO: 187 - DNA, 2383 bp, Homo sapiens
aaaaaaaaaaaaaaaaaaaacaccagtttttccaacatctaattgagcttttgattaattccgtgtaccagattctactgaagaaaggtagccatggaagagaatatggaagagggacagacacaaaaagggtgttttgaatgctgtatcaaatgcctggggggcattccctatgcctctctgattgccaccatcctgctctatgcgggtgttgccctgttctgtggctgcggtcatgaagcgctttctggaactgtcaacattctgcaaacctactttgagatggcaagaactgctggagacacactggatgtttttaccatgattgacatctttaagtatgtgatctacggcatcgcagctgcgttctttgtgtatggcattttgctgatggtggaaggtttcttcacaactggggccatcaaagatctctatggggatttcaaaatcaccacttgtggcagatgtgtgagcgcttggttcattatgctgacatatcttttcatgttggcctggctgggagtcacggctttcacctcactgccagtttacatgtacttcaatctgtggaccatctgccggaacaccacattagtggagggagcaaatctctgcttggaccttcgtcagtttggaattgtgacaattggagaggaaaagaaaatttgtactgtctctgagaatttcttgaggatgtgcgaatctactgagctgaacatgaccttccacttgtttattgtggcacttgctggagctggggcagcagtcattgctatggttcactaccttatggttctgtctgccaactgggcctatgtgaaagacgcctgccggatgcagaagtatgaagacatcaagtcgaaggaagagcaagagcttcatgacatccactctactcgctccaaagagcggctcaatgcatacacataaatgcatcttcctgttctttctaccatttgaatgcattggtgtttaactaagggccatccaaccatccaacctttaaaaaacaaaacgaaagtgcttctcatcaatgatatgtaaggtgacttatgaatcacctgagtacaattctttgttgtttagcacttaaatttcccaatttattaaattgatgtaaatcagatcttttctacaagctcctatccagccttttttttgaaatttctcaaactcatttactagttctgtaaaatcaaagatactaacattgtcaaatgcaaagatttgtttgatttttaaccacttcccatgtgttatacataacaccttttgcattatgtcttatgttttgaaaagaaaatagccttttatactttttagttttgatttcggtaactagtttaactacaggtaaccttcaaaggaccattgtacattatgaacaatagatagagattacatcttgatgactcttgaaatatggaaattttgtctgaagatcagtggccatattactgtaggccctggttcatgttttcatcaatctaaggtgcaatttctaaatttgtaagagtaggtttaaaaaaaaaagtgcttcttatctttgttaacattgtacttttccttgatgttcttaaaaggtatttccctcagattactcatgtttatgttgtgagcatgtagaaacagtaatgctaatgcatggctagttgcctttttaagattgtgacaccaggcttaccttttaaagtttagtatatagagacaattttaatggaaataactactgtagactattgaagaatgatctctttgtgatttaagaagtggctggattggaacttttaatatgctaatgtggaaaattaattacctttatgaaggtggtttattacaaataagcacactaacccctcggaagttgttttacctactttaaaagttttaatggattgcacctctgtaaactattcctaaaatgtgtatgatatatttgaaaaggcttccattaatataatagctttgcttgcagccttccaatctatgttggtttacctgtagtgttttataaagtgtggtcagagggccctatagaatgtattgtttgaaagtgtagtgatatatttgtgtttttatttcaagtaagtcattttaaccgaatgttcattcatattcatttataaaaagtacctgtatcaaaggaattttaacaaagagcaatcagtattattggaccaaatttggtgtttgttttcaccttgacgctcttcttttcattatttctaatgctacaagaatgctgtaaagtgtcttctaaaatgatgtagcctgacaagacatttttttcagtgtataaaactaggtagtattgtgcactgatttgaccattgtgaaatcctttctcagtgtaactgcatttctaataaaaatttattgagtg

SEQ ID NO: 188 - DNA, 403 bp, Homo sapiens
aaaggacaaccacaagtttattccatccatgtgaaataaaactcacatcaacattttaacttagttgtgtgtagatatatacaagtgtgagaaatttgacagctgrgtcaaatgtacaacttaggraaaaaaatwttaccaaactacttgtaagaaaactatcttccctgtatcataaggtactgaacatctgsggvacgrgctcgtscsaattcctgcagcccgggggayccactagttctagagcggcccccaccsggkggagctccascttttttycccyttagkgagggttaatttcgrgcttggggaatmatgggmaaagcttttyccbkkkaaattttawcccghhaaattccaaaaaaawggsccggagraaaaggdaagscgggggccaatrgga

SEQ ID NO: 189 - DNA, 215 bp, Homo sapiens
ggtatgggaagaagttctttattttatcatgtgacaccacataacagatgcctaaccacacaatgtagatatgaataaagaagatggctcagaagagtgtactagtatttstsactcagctagtgaccattatgataaaaagaataaagttttgacttatttacagttttaaaatgcattttatattgagtagttatttcatgttttcttaaaac

SEQ ID NO: 190 - DNA, 223 bp, Homo sapiens
cagaaaactaaagcagcacctttattttatacatacaaacagtataaaatgtttattaggtaagagctgtgttttstttacaatatattatatybscttcavrcgccaatgcaaaavvgttcatacattatattccctatttcattgtgtttagaatatattatattgtttaaatgmcactaccacagtgtaatttttttttttttaatactgaatctctgga

SEQ ID NO: 191 - DNA, 460 bp, Homo sapiens
gcaaagtgagttttatttttttgtaattcctttatctttacttaaaggtgaatgtgtattcctctgggaggaataggaagaaaacaggaatgttaataatgtcgaacagaaaacttcctcccttattaatatataatcctcatgtatttatgcctaatgtaagctgacttttaaaaagctttcttttgttgcatgccctgtgcaggcatctgtattgtacatgcatgcctttcgtcctgttttcctgtataaagttagtgaacaaagaaatatttttgcctagttcatgttgccaagcaatgcatattttttaaatttgtcatatatggaaagagcatgtttgttacatgtaaaagctttactgatatacagatatactaatgtttgaagatgctgttctttgcaagtggtacagttttcaaatgttgttaccagtgaacacccttgtggtttaacttkg

SEQ ID NO: 192 - DNA, 3198 bp, Homo sapiens
ttgggaggagcagtctctccgctcgtctcccggagctttctccattgtctctgcctttacaacagagggagacgatggactgagctgatccgcaccatggagtctcgggtcttactgagaacattctgtttgatcttcggtctcggagcagtttgggggcttggtgtggacccttccctacagattgacgtcttaacagagttagaacttggggagtccacgaccggagtgcgtcaggtcccggggctgcataatgggacgaaagcctttctctttcaagatactcccagaagcataaaagcatccactgctacagctgaacagttttttcagaagctgagaaataaacatgaatttactattttggtgaccctaaaacagacccacttaaattcaggagttattctctcaattcaccacttggatcacaggtacctggaactggaaagtagtggccatcggaatgaagtcagactgcattaccgctcaggcagtcaccgccctcacacagaagtgtttccttacattttggctgatgacaagtggcacaagctctccttagccatcagtgcttcccatttgattttacacattgactgcaataaaatttatgaaagggtagtagaaaagccctccacagacttgcctctaggcacaacattttggctaggacagagaaataatgcgcatggatattttaagggtataatgcaagatgtccaattacttgtcatgccccagggatttattgctcagtgcccagatcttaatcgcacctgtccaacttgcaatgacttccatggacttgtgcagaaaatcatggagctacaggatattttagccaaaacatcagccaagctgtctcgagctgaacagcgaatgaatagattggatcagtgctattgtgaaaggacttgcaccatgaagggaaccacctaccgagaatttgagtcctggatagacggctgtaagaactgcacatgcctgaatggaaccatccagtgtgaaactctaatctgcccaaatcctgactgcccacttaagtcggctcttgcgtatgtggatggcaaatgctgtaaggaatgcaaatcgatatgccaatttcaaggacgaacctactttgaaggagaaagaaatacagtctattcctcttctggagtatgtgttctctatgagtgcaaggaccagaccatgaaacttgttgagagttcaggctgtccagctttggattgtccagagtctcatcagataaccttgtctcacagctgttgcaaagtttgtaaaggttatgacttttgttctgaaaggcataactgcatggagaattccatctgcagaaatctgaatgacagggctgtttgtagctgtcgagatggttttagggctcttcgagaggataatgcctactgtgaagacatcgatgagtgtgctgaagggcgccattactgtcgtgaaaatacaatgtgtgtcaacaccccgggttcttttatgtgcatctgcaaaactggatacatcagaattgatgattattcatgtacagaacatgatgagtgtatcacaaatcagcacaactgtgatgaaaatgctttatgcttcaacactgttggaggacacaactgtgtttgcaagccgggctatacagggaatggaacgacatgcaaagcattttgcaaagatggctgtaggaatggaggagcctgtattgccgctaatgtgtgtgcctgcccacaaggcttcactggacccagctgtgaaacggacattgatgaatgctctgatggttttgttcaatgtgacagtcgtgctaattgcattaacctgcctggatggtaccactgtgagtgcagagatggctaccatgacaatgggatgttttcaccaagtggagaatcgtgtgaagatattgatgagtgtgggaccgggaggcacagctgtgccaatgataccatttgcttcaatttggatggcggatatgattgtcgatgtcctcatggaaagaattgcacaggggactgcatccatgatggaaaagttaagcacaatggtcagatttgggtgttggaaaatgacaggtgctctgtgtgctcatgtcagaatggattcgttatgtgtcgacggatggtctgtgactgtgagaatcccacagttgatcttttttgctgccctgaatgtgacccaaggcttagtagtcagtgcctccatcaaaatggggaaactttgtataacagtggtgacacctgggtccagaattgtcaacagtgccgctgcttgcaaggggaagttgattgttggcccctgccttgcccagatgtggagtgtgaattcagcattctcccagagaatgagtgctgcccgcgctgtgtcacagacccttgccaggctgacaccatccgcaatgacatcaccaagacttgcctggacgaaatgaatgtggttcgcttcaccgggtcctcttggatcaaacatggcactgagtgtactctctgccagtgcaagaatggccacatctgttgctcagtggatccacagtgccttcaggaactgtgaagttaactgtctcatgggagatttctgttaaaagaatgttctttcattaaaagaccaaaaagaagttaaaacttaaattgggtgatttgtgggcagctaaatgcagctttgttaatagctgagtgaactttcaattatgaaatttgtggagcttgacaaaatcacaaaaggaaaattactggggcaaaattagacctcaagtctgcctctactgtgtctcacatcaccatgtagaagaatgggcgtacagtatataccgtgacatcctgaaccctggatagaaagcctgagcccattggatctgtgaaagcctctagcttcactggtgcagaaaattttcctctagatcagaatcttcagaatcagttaggttcctcactgcaagaaataaaatgtcaggcagtgaatgaattatattttcagaagtaaagcaaagaagctataacatgttatgtacagtacactctgaaaagaaatctgaaacaagttattgtaatgataaaaataatgcacaggcatggttacttaatattttctaacaggaaaagtcatccctatttccttgttttactgcacttaatattatttggttgaatttgttcagtataagctcgttcttgtgcaaaattaaataaatatttctcttacctt

SEQ ID NO: 193 - DNA, 6465 bp, Homo sapiens
gagatcagcgctgggacggaacccgggttcctctcgaaccgggattgtgacgcttttggcctggctggccgctgttttctgtcccactttttactcgggcctgcgtccgctgccgccgtccctcagtttgcccccggaggaggcagggcggccgtgccttctgccgtgcgcccgcgtggctgccaccgcccctccgaatcctccggggccgcagaggggttcgctacggagggaggtgggggccttcgggaggaggaggcggaggaggcggaggaggagggaaggaagatggcggccgtggaactagagtggatcccagagactctctataacaccgccatctccgctgtcgtggacaactacatccgctcccgccgagacatccgctccttgcccgagaacatccagtttgatgtttactacaagctttaccaacagggacgcttatgtcaactgggcagtgaattttgtgaattggaagtttttgctaaagtactgagagctttggataaaagacatttgcttcatcattgttttcaggctttgatggatcatggtgttaaagttgcttcagtcttggcctactcattcagtaggcggtgctcttatatagcagaatcagatgctgcagtaaaggaaaaagccattcaggttggctttgttttaggtggctttctttcagatgcaggctggtacagtgatgctgagaaagtttttctgtcctgccttcagttgtgtactctacacgatgagatgcttcattggtttcgtgcagtagaatgttgtgtgaggttgcttcatgtgcgaaatggaaactgcaaatatcatttgggtgaagaaacatttaaattagctcagacatatatggataaactatcaaaacatggccagcaagcaaataaagctgcactctatggagaactgtgtgcactcctatttgcaaaaagtcactatgatgaggcatacaaatggtgcatcgaggcaatgaaagaaattacagcaggcttaccagtgaaagttgtggtggatgtcttaagacaagcttctaaggcttgtgtagtaaaacgtgaatttaagaaggcagaacagttaattaaacatgcagtgtatttggcacgggatcattttggatccaaacacccaaaatattctgatacactgctagattatgggttctacttactcaatgtagataatatctgtcagtctgttgcaatttatcaggcagcccttgacattagacagtcagtgtttggtggcaaaaatatccacgtagcaacagctcatgaagatttggcctactcttcttatgtccaccagtatagctctgggaaatttgacaatgcactatttcatgcagaaagagctattggtatcattacccacatcctacctgaagatcatcttcttttggcttcttcaaagagggtgaaagcacttattttagaggagattgcaattgattgtcataataaggaaactgaacagaggctgcttcaagaagctcatgatttgcacctgtcttcactccaactagctaaaaaagcttttggggaatttaatgtacagactgcaaaacactatggaaaccttggaagactttatcagtcaatgagaaaatttaaggaagctgaagaaatgcacatcaaagcaattcagattaaagaacaacttcttggtcaagaagattatgaagtagccctttcagtgggacatctggcttctttatataattatgacatgaatcagtatgaaaatgctgagaaactttatttgcgatctatagcaattgggaagaaactttttggtgagggctacagtggactagaatatgattatcgaggtctcattaaactttacaactccattggaaattacgagaaagtgtttgaatatcacaatgttctgtctaactggaaccggttgcgagatcggcaatattcagtgacagatgctcttgaagatgtcagcaccagcccccagtccactgaagaagtggtgcagtccttcctgatttctcagaatgtcgagggaccgagctgctgagggaggacctcagttaaccaattaccttttcccggattccagggaattcatactgtgaaatcaaaaccatgttgttttggggggctggaatttgcattgaaacactggtccagtccattgaagaccctattttgggtgatccctatcttgcagaatgtctgtaggaataagcatatattcagttatattcagcatgtaccgcatgtgtaagtagtctggcccacattttcaacctagtagaacaaacaacaggaaatcttttttttgttgtttttaaaaaattcattttgcagaaagcctgaaagaaaaaaaatacccctaaataaaactatttaagagtttaaaagagttgcattcttattatgtaaggatgattttaacaactttttaatatgtaattcttccatgtggaggtattcaatactgtagtgtaaagaaattttatgcggaaaatctttatatgcagtatagaaaagttaacacaagtactaataaaagagggacatcccgacttacgtttttctaccttgcccagataagtggatacaaccactctatattacaaggaaaggactgtcagattcatctgaactggaccagtgttgatctgtaatgtaatagaaaatctgatagaccagcacttctgacttttttttttggtacaacaatgcaagatgctctgatagcatttgctaacaggaccaggaggatctaaaaaggaccagcctaatgtagaaggtggttatttggaccagaggctttagattattattttagatcctacatatacttttatcagtagaatgatttcatttagatgtataatgaaaaaggataatgcaaaaattatgtaatagataccaaattagggaagtttggcaatttcaatggcatatttttagtcaaggtacacagatggcagtgccataagcaagtctataaatatcggctgcagccatccccctcattttaaatgttgccctaataatcaatgcagttaacaagtatattggctgtgtgtcatgaaatagttcatgttcagatggaaatgttaggttactgtatggtttatggagattaatgaaaatgaatgcccaaaaataagtcttagaaaatcctccatttttatggtaaatagtaatacaactaggtcatttcatttgaaatctaggagtcaaatggaaagatcccctaataatacacctatttcactaacttgtctttctgtttattgggttttgatttgattttttgtaagccagtcaggttatttaatgatgaggtaataatcaaatttaagaatttgtgacatgtagcaattcaagaaacaaaaaggtattttgctgttacctcaattcttactgtagtagcccatctgatgcttctatagttaagaatctgggttccccccctattttcaggggttcatgacttggctgttaaagatgttgctcctagctaatgcttggagtagtctgtgggtgaatggatgtgtgttgaattttagttttcttttaacatgcatgttgggtgagaggggaaaaaaatctaagctgtctgccacattgagtacagaaaagttgtagatttcaaattttattaatattttaagcacttttttgaacttcccaaccttgtttgaagctgttatttgcagtcctattagttttgagccattgcatttaagttccctaggagggggttggttgggggatgtactgaaagagatgaagcaaacccacaccctaagatggtaactgtgtgatttagaaacctgagtttactcctcaaatcgaattattttctttttaaattttggaaagagtaaattgacgtacttgcagtttatgaagctgccccccacccctcagttaattgcagtctaatgtcaagaggcacttctttattaattaccaaatagtctttgtgaccaaggactaacatttttaagttactcagctctatcctcatgggcctatatatttaatacctccaaagatattttcaggataggctttgtatacttttattggttatttagaatccagtggtatgtttgtggtataggaatgtcatggtaaattgtttttcaataaatattttgaaacatgtttccatatgaagtttttttttcaatctgtattttttggttttgtgcacatacagcatttcctaggataaaaataaacaaatgacttacagcctcatcctccctaactccatttgaactcaacttagctcacactcagtgataaaacaacatggtatgtagaagcctaggatcacagggtgataatgtcaattggcagccagttgtgtttttttgaaacatcattattggcagtttctccttatcaccactgctttaatgtagtttttttgtaaatccatatactttaatgcatacactctagcttaagaaaacattgccattttggttagggatatgacttaatgtgctattatttctggttctaatgaagaataataccctatgactttaagtgtaagattcatcctttaagtagggatgtttaggataagttagatgtgtgccactatgatttattgggtttcttaaaaatcttgaagaaaataataaaatttatctcacaataagttaacttgcgcaaactttttacatatggtgaggtgcgtaaggaagccctggccaacttaaagatttttctggaggttcagcaaagttatgttaaattaggggcctttggtctcatccttctctgactcttctacccagtcttttcctaaagttcggtgctactccagttgggtgcatcagggagctccgtcagcactcgcatgtgtcgctcaggtggccactcatgcctgcattccatttaatagagtcaattggaatttttagagcataatctttatggaccctcaaagctgactttgccaaagggattgagacccttactaccatcaaatctctgtctctgcttggttaaaaattggctcactattgctttgtagtaacccctgcccaggtattttttcacttgtgaaaataatttgagaaagacctttgttcctagcctgttgggaaaagtttataattttatgaaaattaagtacagaggctgcgatcttagaaataatgaaggtgccatttggctgctccttaatagtgcagacagaaaactgcagtgaacacatgccaaaacatgattgaagcctttggctgaaactttatacatagaaataatgatttgctcataacaggtatcattaactgccactttttatgttttccctagaatttgtagccttgctgcttgcttttcttctgggtggcaaagttactactggaaaaacactataagtacaaagtttttggggttttatctttgctttagaagtgggtgtgtacttcacctcttggctgtggaggaccttagttgccaggaaatttttttttttttttttcagacggagtttcgctcttgttgcccaggctgggagggcaatggcaccatcttggctcactgcaacctccgcctcccgggttccagcgattctcctgcctcagccttccgagtagctgggattacaggctcctgccaccacgcctggctaggaaattttttgttgttaatatgacatttggattaatctccagcttcaacagtacttcttttgtccataaatctcaggaatgttttaggcagaaaactggttttaccctgttgataatcagaaggagtgtgctttaggatttattgcataatactattctttaattgcaatcctaggtatctatagcatgagtggccttagtgagtttgttgaagtgcacatgtttttcaagagtaaaatttaagattaaaaatatatcctatatatagatatctagaaaacttggtttgtggtgcacagtcaagtgttggatcactaaataaccattgcaggtaccgtttgtgtaacattactcatttctgtatattccttttatgggaagatattttgccatggtaactaaaacttttcagttctacttttatgatgtgaatgaatgctacgttttattaaatattaccaggtcagtactatttttatactttattaagcaacaggggattttagtttaataggctcaaaataaaaagtttaatggaacagttaaaaacaaaacactaacaatctttacgtgaaaatccccactaatagtgccacaataatttctatagaaatatctaaggtcattaaatagatttttgaagacggttcttcattgtgtcaggatgacctttcatatcattctcaccaacttgtagtgcccaccgttatttgtaactattaaaccatactaagtatgtttgtaaccagcattgtgatatattctgtacttgtattgctaaaaatgaattattgacctaataaatatagtgttcctgc

SEQ ID NO: 194 - DNA, 225 bp, Homo sapiens
cacattttagcagttaaacttttattttactgtttaaaatttttatttactttttttgtttttcttttctacaaaaggcaggtgatgattgttgatctgcaactattgtgttgtgcactccccgaaaggggcagagtaggaagccagggaaggtgctctgaggatgctttctaagggctgcaggacactcactggagggagtgtctgggcccttctcctgtcctc

SEQ ID NO: 195 - DNA, 274 bp, Homo sapiens
ctgtatttctgttttatttagaaatgatttaaaaaacattatacaaaggctgatcagtttaaaatgtgactgacactgaaatgctgtgatgtcccccaggctgaggggaagctaggctctggggcccccagtgctttgcccctctgtctgccctgtcctggggtgatggacaaacagatgaccacaggcaggagaatctgagattggaagcctctaggctgagccctctgggcctggccccacatccctcacctctgcagcctgggctgcctgc

SEQ ID NO: 196 - DNA, 309 bp, Homo sapiens
  misc_feature: n=a,t,g or c
gagactcaagccaggtttaatgatcattgtctagttttcagagcccagaggctccaagatttgccagcctaggtgtacacaagtgggaggaatggggtcttggacacgggaggcctgcttgctttgtcagcagagctacgaggaagtacagaggtaagaacacacagaaaactggatccatctgctttgctctccccagctggggtgtaccctctcctggcccctttcttnggccccataaatacaaaataataataataataataattacacagattgtagagccctgtcatcctctgtctccaggga

SEQ ID NO: 197 - DNA, 318 bp, Homo sapiens
  misc_feature: n=a,t,g or c
catcacagagttaaaatatttaatgacaaaattagggtttgtngtaatagtgantcaatagagcaggtgttacttatctctgaattaaacaaaaattatatttgacatctcagngaacttctgangantaactgtatgacagacatcagtagtgtcacaatttctaaaattangngctaaacctatctttaatgccccttatttngagcatcctgtaaataattttaaatagatgcacaacctttgctagccacaaaagtagtattaaaacagttttcactgtaacttaagtctaacacgtaatctgaacttcttcag

SEQ ID NO: 198 - DNA, 291 bp, Homo sapiens
  misc_feature: n=a,t,g or c
actttaccaaaatctgtctttattaaagtgaacaaaccattagngcactacccaaaacttaatgaatgatggctgcagttggctcggcttgcctactttaaatgaggcaaacatcagctcctagtgccattccccaccctcatgaccgcgtgccagaagtcatcatcttcacatttgtagacgttgttctagcggaagacaggctttgcagatttcggtgcttttagtgaactggtgttttccgtaaactttttctgagcagcaagggataagaattttttttcagaaatc

SEQ ID NO: 199 - DNA, 298 bp, Homo sapiens
  misc_feature: n=a,t,g or c
ccattgttgttgaacgtttattgagctctaacaatgtgacaggtgccacacaaaacattagacacagtacctgcccagtgggnttacaatctaatctaaggacatgaatctttttttttttttaaagacagagtctcactctgtctaaaaaataataataataaaangcattttgaaattagtcgcggtcaatgcaattctactctttggaatccgtttagctaaatgaatgtngtgctcttgttgaatggaaacaggtgataggaaatgcctaccatttgactcaatatggataatc

SEQ ID NO: 200 - DNA, 317 bp, Homo sapiens
  misc_feature: n=a,t,g or c
gccaacacagtgtgtcatgtttattgggctattcacaggtaagcttaaaatacaatgaaaagaaaagaccagacgtcatcaggaatgtcgagaaacaaaatatttagcatttcttagtttcaaatgttaccatttcattgcagctgaggaatataggccattcgttgacataactgcaatgggtgagacttatttttagccacaggaagcaaatacatttaaccaatgacttttaggacaggaagcaaaaaagaaaacaatattttcatgtagcacggacaagaaaatcatttatacaaattaaagtgatataaaat

SEQ ID NO: 201 - DNA, 305 bp, Homo sapiens
  misc_feature: n=a,t,g or c
gctcagtgaagatttattgttatagaaggcaactaatacaatagatttgtgggctcgaaattttaaaaagttctaaaaaggcagttaaagcttgacaataaacttgagtaaggtttacacaatatcaaagtatattagttctttgaaatgaaaaggtatttttttnctncctttaacattgagatgtctgagatgtcaggattttgtagcattcttagaaacaacatccactgtgtgggatacttttttcccttctggagttttaaaccagtctgactctttggttgtgcctatacaatgaaaag

SEQ ID NO: 202 - DNA, 243 bp, Homo sapiens
  misc_feature: n=a,t,g or c
ccagacaggaaatggcactttaatagttggggccagggtgacaggaccaagatggggctggcctgtntcagtnaggaagcctccctcttctgctgggacagggccttgcggcantcctcctccccgcctgaggtcctaggcctgccacaggcagcatgccggtnaggtcagtggcaggagccacccagaagccccgcagatgacggagctgagaacagggacttcacctccacgtgttgccat

SEQ ID NO: 203 - DNA, 243 bp, Homo sapiens
ttttttttttactttaatttttcttttattttcactgacagaaaaattttctggagagtacaatcaagatagtgtattattagaaataacattaatagaagcttggtcagaaatgataatagtcataataagcatctctctcaccaaggcattccacacagagagatcacagcacaataaataaaggatttctcatttgccacacaacaaataaaacaattgcagtaacaaaaatatgacttt

SEQ ID NO: 204 - DNA, 392 bp, Homo sapiens
  misc_feature: n=a,t,g or c
ttttttttttgctttaaagtctttattatcccgaatataaaagacagagtcctctaggatataacagagttctttacgtggaaacattatttttttacaagtgaaaaaataaatacctcttggaataaaggcttatatgctaatatgtgccataaaaaagtagagttttaatatttgacaaaatgtctgtgcaaagtaaacaaatgcataaacacattactgctacattaaggcaatatgaaaagtatactcaggaaatctcagtaaagtgacagtgtaggtttctaggctttaccttaggctagtattgcacccgntaaggtcatctagggtctcccgacatcccagaaaacctgctaggcttgaccagctttccaaaatggccccaagtt

SEQ ID NO: 205 - DNA, 462 bp, Homo sapiens
  misc_feature: n=a,t,g or c
tgaacatgatgctaaccctgacaggatgaaggaaagtaatattctttcagtgtagttcaggagagcatttgttttcttttctaccaattaacccatcattgcttttaaacaaccatctnaaggagcagagaggcagggtagaagacagaagggggatctatgtggtaactaaagaatgtttctgttttgttaattattgtgtgtgtgtggttttattgtttgcttaagagaatcaaaaactgaaaaaaatgagaatacaggaaatggctcttgtttatttttttgctgtgtttacagcttgttaatgctctactgtctttgtttcaagagagaattgntcactgcccagctcgctttgtgtccngagccctatggccaggccaccntgattaaatcatggcngtttaggatgtttganttttggacccgtttngccattggttatcnttaaaggngtaaaaa

SEQ ID NO: 206 - DNA, 476 bp, Homo sapiens
  misc_feature: n=a,t,g or c
tttttttttttttctggtttaaggatactttattattgaaccagtatgtacaaactctaacatgaaaataatgagtcacagaatatcaagactatttacaatacttttttgttttttacaaaacatttttacaagattacttctctctaaataatgtgacagacatacacaaaaatccaactttttttattacatacataaataaatattgactttaaatgaccactgtaagggacatgaattctacagaccacttggatgagaaggtagcagttttgttatctgcacactacaatataattaagtaaaggggaaaagtaactttatatagacctctgttaatcactccgtaaatcatataactcactaggaatattcagtaggaggtaaggacagtcatgaggattcctctccgtaccngacaccgngtctggacctggcaaattcacaggtaagggtccacctctttntatatc

SEQ ID NO: 207 - DNA, 414 bp, Homo sapiens
  misc_feature: n=a,t,g or c
tttttatgttttttggtaattttttatttagatataatgccacgtttatagaaaagttgcaggaatcgtacaaaaaactcccatacaacttttcaccaagattatatacattcccctcatttgttttgtgtatatgctaatacatcacaaacacacaaaatactttttgaattctgattgaattataaactttttgagtacagattgtaagcaaattgaggtctgctgaaatgtttgatcaagactacattccatttcatgcttttacattttctttatttctattatttccccataataagagttcgggttccagaaagaaaaatgtatttacattttttttccttggtaggtggtggacttaacttcatatatttgtgggggggtggtaacnatactttctccagggncctg

SEQ ID NO: 208 - DNA, 333 bp, Homo sapiens
  misc_feature: n=a,t,g or c
gaaatcatttnntgntctttaatcatagcaaatgtgtttttacggtagtcataaaatcaacattaccacatatacaaaggacaagacaccagtttggcatacaaaaataccatatattaaaattgggttcattggaaaactcaggactggctaagacaccatctataacagagagagcaagcaagantgcttttaaggacattcagatttataaacaggcagcttgatatcccctttacgaggtcaatatttgggcaacatttggggccaatatttttctacacagcccggcaggctcatttatctgtagggggctatttgggncccttaaaa

SEQ ID NO: 209 - DNA, 363 bp, Homo sapiens
gagtgttaaaataattacacttaatattttaatagtgtgctgtgaaatacatagttttttgttttgttttggcaaatgtttcattttgttttaatgacttcggtccaatataaagaaaatgaaatacagtgaatagttcttctttcaagatgagctgtatttattactggaacggaagttgtcatatccgtgatcattagctttgaactttaagcacgactgcttttcctccaaggactgtttttcttcaaatgactggcaccagcagcataaagcatgacttaaagcagtttttgaaacttttgcccacccaatacagagcaattggggttaatgccgggaattccagtgaaagccaggttg

SEQ ID NO: 210 - DNA, 3202 bp, Homo sapiens
ctgagacaccgcagcttccctgagcgccgagtccctccggggacagcagcagggagcgcccgcgcagccaccgagcctctgcccagccaagccgccgtcgccgcgccgggggaccgccagccatggccgcgccgggggatccgcaggacgagctgctgccgctggccggccccgggtcccagtggctcaggcaccgaggggagggggagaacgaagcggtgacgccgaaaggggccacgccggcgccgcaggctggggagcccagcccggggttgggcgccagggcccgggaagcggcgtcgcgggaagccggctcgggccccgcccggcagtcgcccgttgccatggaaactgcatccacaggtgtggcaggtgtttccagtgccatggaccacaccttctcaacaacatcaaaagatggggaaggatcgtgttacacatctctcatttctgacatctgctatccacctcaggaggattctacatattttactggaattcttcagaaggaaaatggccacgtcaccatttcagagagccctgaggagctgggtacacccggcccctccttaccagatgtgcctgggatagagtctcgtggcttatttagttctgattctggaatagagatgactcctgcagagtccacggaagtgaacaagatcttagcagaccctctggaccagatgaaagcagaggcctataaatacattgacataaccagacccgaggaggtgaagcaccaagaacaacatcaccccgagctggaagataaagacttggactttaagaataaagacactgacatctcaattaaacctgaaggagtccgtgaacctgacaaaccagctcctgtggagggaaaaatcatcaaggaccatttattggaagaatccacatttgctccatacatagatgatctctctgaagaacagcgcagggctcctcagatcaccacccctgtcaaaatcacactgacggaaatagaaccttctgttgaaaccactacccaagagaagacccctgagaagcaagatatatgtctaaagccaagtcctgacacagtccccactgtcactgtctcggagcctgaagacgacagcccaggatctatcacccctccatcttctggaacagaaccatctgctgcagaatcccaggggaaaggcagcatctccgaggatgagctgatcaccgccatcaaagaagcaaagggattatcgtatgaaaccgccgagaacccacggccggtgggccagctggccgacaggcccgaggtcaaggccaggtccggaccgccaaccatccccagccccctggaccacgaggccagcagcgcggagtcgggggactcagagatcgagctggtgtccgaggaccccatggccgcggaggacgcgctgccctcaggctatgtgagctttggccacgtgggcggcccgccgccctcgcccgcctcgccatccatccagtacagcatcctgagggaggagcgcgaggccgagctggacagcgagctcatcatcgagtcgtgcgacgcctcctcggcctcggaggagagccccaagcgggagcaggactcacccccgatgaagcccagcgccctggatgccatccgggaggagactggcgtccgggccgaggagcgtgcgccaagccggcggggcctggccgagccgggttccttcctcgactacccctcaactgagccccagcctggccccgagctgccccctggagacggagccctggagcctgagacgcccatgttgccacggaagcctgaagaagactcgagttccaaccaaagtcctgcggccacaaagggccctgggcctctaggtcctggcgccccgcccccactgctgtttctcaataagcaaaaagctattgacctgttgtattggcgggacatcaagcagacgggcatcgtgtttgggagtttcctgctgctgctcttctccctgacccagttcagcgtggtgagcgtcgtggcctacctggccctggccgcactctcagccaccatcagtttccgcatctacaagtctgttttacaagcagtgcagaaaaccgacgaaggccaccctttcaaggcctacttggagcttgagatcaccctttctcaggagcagattcagaagtacacggactgcctgcagttctacgtgaacagcacacttaaggaactgaggaggctcttccttgtccaggacctggtggattccttaaaatttgcagtcctgatgtggctcctgacctacgttggcgctctcttcaatggcctgaccctgctgctcatggctgtggtttcaatgtttactctacctgtagtgtatgttaagcaccaggcacagattgaccaatatctgggacttgtgaggactcacataaatgctgttgtggcaaagattcaggctaaaatcccaggcgctaagaggcacgctgagtaaactgatttcccaccggggactggacacaaacaggaatgtctggagtggtaacagctctcttcttactcattactgcaaattgattgtctttcccccctccctccagtaccataatcttagagacaaaccttaaaacagctgtttttaggctgttccttgtactcttaggatatttgagtcacttgtgtcaaccactaaagtatagagaaaagtgtattagatgtggtttttaattttgtgttgctaaaaaaagtgcatgatggtgagagcccaagttatctttccctcttcggtgttcttcttctcttctctgcaatgcttctgtagcttctaatgttccccgtggctaggcctttcctgccgagtgctctgatgcaatagtggaaatcgcttatatgtccttgggttgctggttggattaatctttaataacaatatatagaattgtagactgatgttttagcatttttccaacacacacaacgtaaaaataaaagcagtcgaccgcacttatggtaatcagttttgtataacttaaaataattaaataaatgaataaatccaaaacaaacatgcagtacttttgttgtatgggattggtgggctgatttacatgtatggttactaaaaagtaccagcatgttaactttattacaatttgtattactttctctgtagttcctaatggattcaattacggactctggatatttgcacttatgtacttgatactgaatgcataaataaat

SEQ ID NO: 211 - DNA, 2595 bp, Homo sapiens
cgggctgggcggttccgcggcctgggcctaggggcttaacagtagcaacagaagcggcggcggcggcagcagcagcagcagcagcagcaatctcttcccgaacacgagcaccacaggcgcccgaaggccggaacaggcgtttagagaaaatggcagacgatattgatattgaagcaatgcttgaggctccttacaagaaggatgagaacaagttgagcagtgccaacggccatgaagaacgtagcaaaaagaggaaaaaaagcaagagcagaagtcgtagtcatgaacgaaagagaagcaaaagtaaggaacggaagcgaagtagagacagagaaaggaaaaagagcaaaagccgtgaaagaaagcgaagtagaagcaaagagaggcgacggagccgctcaagaagtcgagatcgaagatttagaggccgctacagaagtccttactccggaccaaaatttaacagtgccatccgaggaaagattgggttgcctcatagcatcaaattaagcagacgacgttcccgaagcaaaagtccattcagaaaagacaagagccctgtgagagaacctattgataatttaactcctgaggaaagagatgcaaggacagtcttctgtatgcagctggcggcaagaattcgaccaagggatttggaagagtttttctctacagtaggaaaggttcgagatgtgaggatgatttctgacagaaattcaagacgttccaaaggaattgcttatgtggagttcgtcgatgttagctcagtgcctctagcaataggattaactggccaacgagttttaggcgtgccaatcatagtacaggcatcacaggcagaaaaaaacagagctgcagcaatggcaaacaatttacaaaagggaagtgctggacctatgaggctttatgtgggctcattacacttcaacataactgaagatatgcttcgtgggatctttgagccttttggaagaattgaaagtatccagctgatgatggacagtgaaactggtcgatccaagggatatggatttattacattttctgactcagaatgtgccaaaaaggctttggaacaacttaatggatttgaactagcaggaagaccaatgaaagttggtcatgttactgaacgtactgatgcttcgagtgctagttcatttttggacagtgatgaactggaaaggactggaattgatttgggaacaactggtcgtcttcagttaatggcaagacttgcagagggtacaggtttgcagattccgccagcagcacagcaagctctacagatgagtggctctttggcatttggtgctgtggcagatttgcaaacaagactttcccagcagactgaagcttcagctttagctgcagctgcctctgttcagccacttgcaacacaatgtttccaactctctaacatgtttaaccctcaaacagaagaagaagttggatgggataccgagattaaggatgatgtgattgaagaatgtaataaacatggaggagttattcatatttatgttgacaaaaattcagctcagggcaatgtgtatgtgaagtgcccatcaattgctgcagctattgctgctgtcaatgcattgcatggcaggtggtttgctggtaaaatgataacagcagcatatgtacctcttccaacttaccacaacctgtttcctgattctatgacagcaacacagctactggttccaagtagacgatgaaggaagatatagtcccttatgtatatagctttttttctttcttgagaattcatcttgagttatcttttatttagataaaaataaagaggcaaggatctactgtcatttgtatgcaatttcctgttaccttgaaaaaataaaaatgttaacaggaatgcagtgtgctcattctccctaaatagtaaatcccactgtatacaaaactgttctcttgttctgccttttaaaatgttcatgtagaaaattaatgaactataggaatagctctaggagaacaaatgtgctttctgtaaaaaggcagaccagggatgtaatgtttttaatgtttcagaagcctaactttttacacagtggttacatttcacatttcactaatgttgatatttggctgatggttgagcagtttctgaaatacacatttagtgtatggaaatacaagacagctaaagggctgtttggttagcatctcatcttgcattctgatcaattggcaagaaagggagatttcaaaattatatttcttgatggtatcttttcaattaatgtatctgtaaaagtttctttgtaaatactatgtgttctggtgtgtcttaaaattccaaacaaaatgatccctgcatttcctgaagatgtttaaacgtgagagtctggtaggcaaagcagtctgagaaagaaataggaaatgcagaaataggttttgtctggttgcatataatctttgctctttttaagctctgtgagctctgaaatatatttttgggttacttcagtgtgtttgacaagacagcttgatatttctatcaaacaaatgactttcatattgcaacaatctttgtaagaaccactcaaataaaagtctcttaaaaaggcc

SEQ ID NO: 212 - DNA, 655 bp, Homo sapiens
ccaatggccattagccttcacccatccgcacgacctcatttacatcccctattcttatcatcttccagaccacctcgagagccaggggttcagagcccctctttcctaatgagggctcccaggacaggatgaggtgcctgcctgaggtcacacggcagggagtgcagctccccctgccccgacctgctgagccccatcacttccgcagatcctggcattctctcagaagctgtactacgacaaggaacagacagtgagcatgaaggacaatgtcaggcccctgcagcagctggggcagcgcacggtgataaagtccggggccccgggtcggccgctgccctgggccctgcctgccctgctgggccccatgctggcctgcctgctggccggcttcctgcgatgatggctcacttctgcacgcagcctctctgttgcctcagctctccaagttccaggcttccggtccttagccttcccaggtgggactttaggcatgattaaaatatggacatatttttggagaaacctttctcaagtgtgtttttagccttccacaactaccccaccctgtccccctccacccacccctgttcctcctgttccagggcgggggctttaaggccaggagatttctccaagcaggtaccaccaggtg

SEQ ID NO: 213 - DNA, 2069 bp, Homo sapiens
ctatcaatctccagagctttttctttttaagtgtgagcgagtttattagagaagtaaagagacccaagagtgcctactccatagacagagcagccactgtgacactgtacccattaaacactaactctccattgcccctccagcaacccctagcacccactgtctactttctgtctctatgtggttgtctatttgagggacatcacataagtggagtcatatatttgtcctttcatgtctcccttatttcatttagcataacgttttcaagggtttcctgtgttgtgaatatatcagaatttcattctctttttaaggtagaatcatatcattttaaaacatttcagttggaccatctaagttcagtccttcattttcaacaattaaaaaacagccctcaaccgggtgcatctcacgttagctagagacagaactggagctagaagtcagatctcttaccaaagttgcctttcttcttctgtgggtaagtggggcacccttgggacgctgtgctgggcgtacatgggtgcttgatgaagttacttggtggactgatgtgattgatgtccaacatgtatgcagggacagaggctatggtccctacagagcaggcatggagagaaggagaaatacatacgggcaggagccaggagagggagggtgtagtgagcagagaccgcgccactgcactccagcctgagtgacagagtgagaatccatctaaaaaattgcttactaaagaagtggtctcctgaggtcttaagacgttcctggcaatgtcttgagtgggtgggagagagcctccagtcattgagctgtggaatttcagaggtgagaaccacacctaacccccaattactttcccctgtttgcctcagtgacacagctgcaggaaccctggtgggtgttgtattaagtaaatttgacctttattctttgcagatctgtgaaatgttgtcttctgaggggccacgtgtatctgtagtgctgaggactccttggggcctctgaagtcacagagagaacctgcagggtgggggaccagtgtgtgacagccctgctttgcattttctttgagaagtgctgtcattttgcatttctctccaccaggggaatcttcaatcttgagaggtgtgatcataacttgccttgtttcttgtcgctacagagaacggaaggctcccttgatggaacttagacagcaaggccagatgcacatccctggaaggacatccatgttccgagaagaacagatgatccctgtatttcaagacctctgtgcacttatttatgaacctgccctgctcccacagaacacagcaattcctcaggctaagctgccggttcttaaatccatcctgctaagttaatgttgggtagaaagagatacagaggggctgttgaatttcccacataccctccttccaccaagttggaacatccttggaaattgggaagagcacaagaggagatccagggcaaggccattgggatattctgaaacttgaatattttgttttgtgcagagataaagaccttttccatgcaccctcatacacagaaaccaattttcttttttatactcaatcatttctagcgcatggcctggttagaggctggttttttctcttttcctttggtccttcaaaggcttgtagttttgggtagtccttgttctttggaaatacacagtgctgaccagacagcctccccctgtcccctctatgacctcgccctccacaaatgggaaaaccagactacttgggagcaccgcctgtgaaataccaacctgaagacacggttcattcaggcaacgcacaaaacagaaaatgaaggtggaacaagcacatatgttcttcaactgtttttgtctacactctttctcttttcctctacatgctgaaggctgaaagacaggaaagatggtgccatcagcaaatattattcttaattgaaaacttgaaatgtgtatgtttcttactaatttttaaaaatgtattccttgccagggcaggcaaggtcgtcacgcctgtaatcccagcacttcaggaggctgaggtgggcggatc

SEQ ID NO: 214 - DNA, 3451 bp, Homo sapiens
cccgggttcaagagattctcctgtctcagcctcccgagtagctgggactacaggtacgtgccaccacacctggctaatttttgtatttttagtagagacaagagttacaccatattggccaggatcttttgctttctatagcttcaaaatgttcttaatgttaagacattcttaatactctgaaccatatgaatttgccattttggtaagtcacagacgccagatggtggcaatttcacatggcacaacccgaaagattaacaaactatccagcagatgaaaggattttttttagtttcattgggtttactgaagaaattgtttgaattctcattgcatctccagttcaacagataatgagtgagtgatgccacactctcaagagttaaaaacaaaacaacaaaaaaattaaaacaaaagcacacaactttctctctctgtcccaaaatacatacttgcatacccccgctccagataaaatccaaagggtaaaactgtcttcatgcctgcaaattcctaaggagggcacctaaagtacttgacagcgagtgtgctgaggaaatcggcagctgttgaagtcacctcctgtgctcttgccaaatgtttgaaagggaatacactgggttaccgggtgtatgttgggaggggagcattatcagtgctcgggtgaggcaagttcggagtacccagatggagacatccgtgtctgtgtcgctctggatgcctccaagccagcgtgtgtttactttctgtgtgtgtcaccatgtctttgtgcttctgggtgcttctgtgtttgtttctggccgcgtttctgtgttggacaggggtgactttgtgccggatggcttctgtgtgagagcgcgcgcgagtgtgcatgtcggtgagctgggagggtgtgtctcagtgtctatggctgtggttcggtataagtctgagcatgtctgccagggtgtatttgtgcctgtatgtgcgtgcctcggtgggcactctcgtttccttccgaatgtggggcagtgccggtgtgctgccctctgccttgagacctcaagccgcgcaggcgcccagggcaggcaggtagcggccacagaagagccaaaagctcccgggttggctggtaaggacaccacctccagctttagccctctggggccagccagggtagccgggaagcagtggtggcccgccctccagggagcagttgggccccgcccgggccagccccaggagaaggagggcgaggggaggggagggaaaggggaggagtgcctcgccccttcgcggctgccggcgtgccattggccgaaagttcccgtacgtcacggcgagggcagttcccctaaagtcctgtgcacataacgggcagaacgcactgcgaagcggcttcttcagagcacgggctggaactggcaggcaccgcgagcccctagcacccgacaagctgagtgtgcaggacgagtccccaccacacccacaccacagccgctgaatgaggcttccaggcgtccgctcgcggcccgcagagccccgccgtgggtccgcccgctgaggcgcccccagccagtgcgcttacctgccagactgcgcgccatggggcaacccgggaacggcagcgccttcttgctggcacccaatagaagccatgcgccggaccacgacgtcacgcagcaaagggacgaggtgtgggtggtgggcatgggcatcgtcatgtctctcatcgtcctggccatcgtgtttggcaatgtgctggtcatcacagccattgccaagttcgagcgtctgcagacggtcaccaactacttcatcacttcactggcctgtgctgatctggtcatgggcctggcagtggtgccctttggggccgcccatattcttatgaaaatgtggacttttggcaacttctggtgcgagttttggacttccattgatgtgctgtgcgtcacggccagcattgagaccctgtgcgtgatcgcagtggatcgctactttgccattacttcacctttcaagtaccagagcctgctgaccaagaataaggcccgggtgatcattctgatggtgtggattgtgtcaggccttacctccttcttgcccattcagatgcactggtaccgggccacccaccaggaagccatcaactgctatgccaatgagacctgctgtgacttcttcacgaaccaagcctatgccattgcctcttccatcgtgtccttctacgttcccctggtgatcatggtcttcgtctactccagggtctttcaggaggccaaaaggcagctccagaagattgacaaatctgagggccgcttccatgtccagaaccttagccaggtggagcaggatgggcggacggggcatggactccgcagatcttccaagttctgcttgaaggagcacaaagccctcaagacgttaggcatcatcatgggcactttcaccctctgctggctgcccttcttcatcgttaacattgtgcatgtgatccaggataacctcatccgtaaggaagtttacatcctcctaaattggataggctatgtcaattctggtttcaatccccttatctactgccggagcccagatttcaggattgccttccaggagcttctgtgcctgcgcaggtcttctttgaaggcctatgggaatggctactccagcaacggcaacacaggggagcagagtggatatcacgtggaacaggagaaagaaaataaactgctgtgtgaagacctcccaggcacggaagactttgtgggccatcaaggtactgtgcctagcgataacattgattcacaagggaggaattgtagtacaaatgactcactgctgtaaagcagtttttctacttttaaagacccccccccccccaacagaacactaaacagactatttaacttgagggtaataaacttagaataaaattgtaaaaattgtatagagatatgcagaaggaagggcatccttctgccttttttatttttttaagctgtaaaaagagagaaaacttatttgagtgattatttgttatttgtacagttcagttcctctttgcatggaatttgtaagtttatgtctaaagagctttagtcctagaggacctgagtctgctatattttcatgacttttccatgtatctacctcactattcaagtattaggggtaatatattgctgctggtaatttgtatctgaaggagattttccttcctacacccttggacttgaggattttgagtatctcggacctttcagctgtgaacatggactcttcccccactcctcttatttgctcacacggggtattttaggcagggatttgaggagcagcttcagttgttttcccgagcaaaggtctaaagtttacagtaaataaaatgtttgaccatgccttcattgcacctgtttgtccaaaaccccttgactggagtgctgttgcctcccccactggaaaccgc

SEQ ID NO: 215 - DNA, 914 bp, Homo sapiens
ttttacagaactcccacggacacaccatgataaggacgctgctgctgtccactttggtggctggagccctcagttgtggggaccccacttacccaccttatgtgactagggtggttggcggtgaagaagcgaggcccaacagctggccctggcaggtctccctgcagtacagctccaatggcaagtggtaccacacctgcggagggtccctgatagccaacagctgggtcctgacggctgcccactgcatcagctcctccaggacctaccgcgtggggctgggccggcacaacctctacgttgcggagtccggctcgctggcagtcagtgtctctaagattgtggtgcacaaggactggaactccaaccaaatctccaaagggaacgacattgccctgctcaaactggctaaccccgtctccctcaccgacaagatccagctggcctgcctccctcctgccggcaccattctacccaacaactacccctgctacgtcacgggctggggaaggctgcagaccaacggggctgttcctgatgtcctgcagcagggccggttgctggttgtggactatgccacctgctccagctctgcctggtggggcagcagcgtgaaaaccagtatgatctgtgctgggggtgatggcgtgatctccagctgcaacggagactctggcgggccactgaactgtcaggcgtctgacggccggtggcaggtgcacggcatcgtcagcttcgggtctcgcctcggctgcaactactaccacaagccctccgtcttcacgcgggtctccaattacatcgactggatcaattcggtgattgcaaataactaaccaaaagaagtccctgggactgtttcagacttggaaaggtcacagaaggaaaataatataataaagtgacaactatgc

SEQ ID NO: 216 - DNA, 562 bp, Homo sapiens
tggtcatctcagtttcttttctcaccttgactgcaagatgaaactccttgtgctagctgtgctgctcacagtggccgccgccgacagcggcatcagccctcgggccgtgtggcagttccgcaaaatgatcaagtgcgtgatcccggggagtgaccccttcttggaatacaacaactacggctgctactgtggcttggggggctcaggcacccccgtggatgaactggacaagtgctgccagacacatgacaactgctatgaccaggccaagaagctggacagctgtaaatttctgctggacaacccgtacacccacacctattcatactcgtgctctggctcggcaatcacctgtagcagcaaaaacaaagagtgtgaggccttcatttgcaactgcgaccgcaacgctgccatctgcttttcaaaagctccatataacaaggcacacaagaacctggacaccaagaagtattgtcagagttgaatatcacctctcaaaagcatcacctctatctgcctcatctcacactgtactctccaataaagcaccttgttgaaagaa

SEQ ID NO: 217 - DNA, 2943 bp, Homo sapiens
gggaagcatggggcttcccaggctggtctgcgccttcttgctcgccgcctgctgctgctgtcctcgcgtcgcgggtgtgcccggagaggctgagcagcctgcgcctgagctggtggaggtggaagtgggcagcacagcccttctgaagtgcggcctctcccagtcccaaggcaacctcagccatgtcgactggttttctgtccacaaggagaagcggacgctcatcttccgtgtgcgccagggccagggccagagcgaacctggggagtacgagcagcggctcagcctccaggacagaggggctactctggccctgactcaagtcaccccccaagacgagcgcatcttcttgtgccagggcaagcgccctcggtcccaggagtaccgcatccagctccgcgtctacaaagctccggaggagccaaacatccaggtcaaccccctgggcatccctgtgaacagtaaggagcctgaggaggtcgctacctgtgtagggaggaacgggtaccccattcctcaagtcatctggtacaagaatggccggcctctgaaggaggagaagaaccgggtccacattcagtcgtcccagactgtggagtcgagtggtttgtacaccttgcagagtattctgaaggcacagctggttaaagaagacaaagatgcccagttttactgtgagctcaactaccggctgcccagtgggaaccacatgaaggagtccagggaagtcaccgtccctgttttctacccgacagaaaaagtgtggctggaagtggagcccgtgggaatgctgaaggaaggggaccgcgtggaaatcaggtgtttggctgatggcaaccctccaccacacttcagcatcagcaagcagaaccccagcaccagggaggcagaggaagagacaaccaacgacaacggggtcctggtgctggagcctgcccggaaggaacacagtgggcgctatgaatgtcaggcctggaacttggacaccatgatatcgctgctgagtgaaccacaggaactactggtgaactatgtgtctgacgtccgagtgagtcccgcagcccctgagagacaggaaggcagcagcctcaccctgacctgtgaggcagagagtagccaggacctcgagttccagtggctgagagaagagacagaccaggtgctggaaagggggcctgtgcttcagttgcatgacctgaaacgggaggcaggaggcggctatcgctgcgtggcgtctgtgcccagcatacccggcctgaaccgcacacagctggtcaagctggccatttttggccccccttggatggcattcaaggagaggaaggtgtgggtgaaagagaatatggtgttgaatctgtcttgtgaagcgtcagggcacccccggcccaccatctcctggaacgtcaacggcacggcaagtgaacaagaccaagatccacagcgagtcctgagcaccctgaatgtcctcgtgaccccggagctgttggagacaggtgttgaatgcacggcctccaacgacctgggcaaaaacaccagcatcctcttcctggagctggtcaatttaaccaccctcacaccagactccaacacaaccactggcctcagcacttccactgccagtcctcataccagagccaacagcacctccacagagagaaagctgccggagccggagagccggggcgtggtcatcgtggctgtgattgtgtgcatcctggtcctggcggtgctgggcgctgtcctctatttcctctataagaagggcaagctgccgtgcaggcgctcagggaagcaggagatcacgctgcccccgtctcgtaagaccgaacttgtagttgaagttaagtcagataagctcccagaagagatgggcctcctgcagggcagcagcggtgacaagagggctccgggagaccagggagagaaatacatcgatctgaggcattagccccgaatcacttcagctcccttccctgcctggaccattcccagctccctgctcactcttctctcagccaaagctcaaagggactagagagaagcctcctgctcccctcgcctgcacaccccctttcagagggccactgggttaggacctgaggacctcacttggccctgcaaggcccgcttttcagggaccagtccaccaccatctcctccacgttgagtgaagctcatcccaagcaaggagccccagtctcccgagcgggtaggagagtttcttgcagaacgtgttttttctttacacacattatgctgtaaatacgctcgtcctgccagcagctgagctgggtagcctctctgagctggtttcctgccccaaaggctggcattccaccatccaggtgcaccactgaagtgaggacacaccggagccaggcgcctgctcatgttgaagtgcgctgttcacacccgctccggagagcaccccagcagcatccagaagcagctgcagtgcaagcttgcatgcctgcgtgttgctgcaccaccctcctgtctgcctcttcaaagtctcctgtgacattttttctttggtcagaggccaggaactgtgtcattccttaaagatacgtgccggggccaggtgtggctcacgcctgtaatcccagcactttgggaggccgaggcggcggatcacaaagtcagacgagaccatcctggctaacacggtgaaaccctgtctctactaaaaatacaaaaaaaaattagctaggcgtagtggttggcacctatagtcccagctactcggaaggctgaagcaggagaatggtatgaatccaggaggtggagcttgcagtgagccgagaccgtgccactgcactccagcctgggcaacacagcgagactccgtctcgagccggccggttgcgcgggccctcggaccctcagagaggcgagggttcgagggcacgagttcgaggccaacctggtccacatgggttg

SEQ ID NO: 218 - DNA, 3045 bp, Homo sapiens
cagaccatggaactcagcgtcctcctcttccttgcactcctcacaggactcttgctactcctggttcagcgccaccctaacacccatgaccgcctcccaccagggccccgccctctgccccttttgggaaaccttctgcagatggatagaagaggcctactcaaatcctttctgaggttccgagagaaatatggggacgtcttcacggtacacctgggaccgaggcccgtggtcatgctgtgtggagtagaggccatacgggaggcccttgtggacaaggctgaggccttctctggccggggaaaaatcgccatggtcgacccattcttccggggatatggtgtgatctttgccaatggaaaccgctggaaggtgcttcggcgattctctgtgaccactatgagggacttcgggatgggaaagcggagtgtggaggagcggattcaggaggaggctcagtgtctgatagaggagcttcggaaatccaagggggccctcatggaccccaccttcctcttccagtccattaccgccaacatcatctgctccatcgtctttggaaaacgattccactaccaagatcaagagttcctgaagatgctgaacttgttctaccagactttttcactcatcagctctgtattcggccagctgtttgagctcttctctggcttcttgaaatactttcctggggcacacaggcaagtttacaaaaacctgcaggaaatcaatgcttacattggccacagtgtggagaagcaccgtgaaaccctggaccccagcgcccccaaggacctcatcgacacctacctgctccacatggaaaaagagaaatccaacgcacacagtgaattcagccaccagaacctcaacctcaacacgctctcgctcttctttgctggcactgagaccaccagcaccactctccgctacggcttcctgctcatgctcaaataccctcatgttgcagagagagtctacagggagattgaacaggtgattggcccacatcgccctccagagcttcatgaccgagccaaaatgccatacacagaggcagtcatctatgagattcagagattttccgaccttctccccatgggtgtgccccacattgtcacccaacacaccagcttccgagggtacatcatccccaaggacacagaagtatttctcatcctgagcactgctctccatgacccacactactttgaaaaaccagacgccttcaatcctgaccactttctggatgccaatggggcactgaaaaagactgaagcttttatccccttctccttagggaagcggatttgtcttggtgaaggcatcgcccgtgcggaattgttcctcttcttcaccaccatcctccagaacttctccatggccagccccgtggccccagaagacatcgatctgacaccccaggagtgtggtgtgggcaaaatacccccaacataccagatccgcttcctgccccgctgaaggggctgagggaagggggtcaaaggattccagggtcattcagtgtccccgcctctgtagacaatggctctgactccccgcaacttcctgcctctgagagacctgctacaagccagcttccttcccctccatggcaccagttgtctgaggtcacattgcaagtgagtgcaggagtgagattatcgaaaattataatatacaaaatcatatatatatatatgttcttgttttttgagacagagtctcacactgttgcccaggctggagtgcagtggcgtgatcttggctcactgcaacctccacccccggggatcaagcaactctcctgcctcagcctccctagaggctgggattacaggcatgcactaccacgcttggctaatttttgtatttttagtagagatggggtttcactgtgtaggccaggctggtctcgaactcctgaactcaagtgattcacccaccttagcctcccaaagtgctgggattacaggcgtgagtcaccgtgcccagccatgtatatatataattttaaaaattaagctgaaattcacataacataaaattagccgttttaaagtgtaaaatttagtggcgtgtggttcattcacaaagctgtacaaccaccaccatctagttccaaacattttctttttttctgagatggagtctcactctgtcacccaggttcgagttcagtggtgccatctctgtccactgcaacctccacatcctgggttcaagtgattctcctgcctcagcctctggaggagctggtatcacaggcgtcccccaccacgcctggctaaattttgtatttttaggtggtcttgaactcctgatgtcaggtgattctcctagctccaaatgttttcattatctctcccccaacaaaacccatacctatcaagctgtcactccccataccccattctctttttcatctcggcccctgtcaatctggtttttgtcactatggacttaccaattctgaatatttcccataaacagaatcatacaatatttgatttttttttttttttgaaactaagccttgctctgtctcccaggctggagtgctatggtgcaatttttgttcactgcaacctctgccttccaagatcaagagattctccagtctcagctcccaagtagctgggattacaggcatgtactaccatgcctggctaattttcttgtagttttagtagggacatgttggccaggctggtggtgagctcctggcctcaggtgatccacccacctcagtgttcctaagtgctgatattacaggcataatatgtgatcttttgtgtctggttgctttcatgttgaatgctatttttgaggttcgtgcctgttgtagaccacagtcacacactgctgtagtcttcccgagtcctcattcccagctgcctcttcctactgcttccgtctatcaaaaagcccccttggcccaggttccctgagctgtgggattctgcactggtgctttggattccctgatatgttccttcaaatctgctgagaattaaataaacatctctaaagcctgacctcccc

SEQ ID NO: 219 - DNA, 4567 bp, Homo sapiens
cctcgcccgccccgcgcgtgactgacagggccactcagggcgcgcgtgcgaggtgctcgcttgggtaatctacctgcgtgggcccgccggcggtaccctgcacagcctgctagaaactgagaccccgggtggtgacagctctggcatcgcccctgggtcctcgggaagaggggacagaaggtcccgagtctcccaggccacacgaagcaagtcactgctcttcctggcctcagtttactcctcctgataaaggaggccataatagtgcctcacctggctgttggctctttctctttagggcaaggcaggttggaggggaaaataggacctgtgcttaccgccggagcagggcgagagtgattctgggccagttctgaacctctctgagattcggagatctcttgtcagtggggcttctggacaactgagtgggctgattgatgcgcggcccagcacgcggcccagtgctcgaggcagggagcgtgtttatcaagagggataaacttgatacgaactctgtacgaaggaaggtgtaggtggatggaggggtgtgtgctgccactgagcacaagaacccacggggtggcctgccaaagttcaaaacgagggagacaggttgatctggacccaggaactacagtgctgaatcctaaaccggggaaagatgagacctagaagagggaggtggtaacctaattggagggtgaggagggaaagagcctgccacagatggggcatctataggggtgctgttgataacagagcagctgacttaagcccgaagtgggtacttctccctgggcagatgggaggtctgggacaggctcctctggcagaagggctcctggccaccctgtcctaaggtgggtcagtcacttcctccttcaccagttccacagcatcttactatgagcttggcattcgaggcttctcttggcagggccctgcactcctagcctctccttgcacattgcacccccattccagagaggtttagttaaaggcgggggttaccaagtcagtcagatcttgggcaagtcaccactcctccagagcctcagtttccttatctggaaagtggaggtcatggcaacccgccaacctggttggatgggagcctgagctgttgtgttgcaccttgcctggggcccacgactttgtagctcctgtcctgcactgggcttatgttttcattcattccagaaaccttttcagagagtccctttggggagtgtgggggacaggagggaaagaaacctggtccttgtagccgttcgtctgctccctgccctgggcagaggacatggggactcaggccagcctgagatcactgggaccagaggaggggctggaggatactacacgcaggggtgggctgggctgggctgggctgggccaggaatgcagcggggcagggctatttaagtcaagggccggctggcaaccccagcaagctgtcctgtgagccgccagcatggatgacatctacaaggctgcggtgagggacagggctgggtagggctggggtgggcaggcccactgggggctcactcagctgagagtgcggggttagtagccccagggaagtggtggggaccaaggagaaggcctacgtgccttcaacccaggccctcacagggacagtgattctggtgtttgaggatgcagaagggggtagggggttccgggtctgaagggtggtggaggaggttgcagctttctgatcgtgtctcactctctgtttccaagtgtctgtggtctgtggcactgtcgctcagccacatgtctctgcatttgtctctggacgtttttgccttcctcttttcatctcttcctcctgagctgtctgagtccccattactgtctccctgtccccaacccccactttctgcccctcacattctgcttctcacatgctcaaaatctgccacccactccagcccttggcgggccgaagatgcttggagggtggagggtgtgagaggaggggtctgtagagcctgagtcctgggctggagatggggctttgaagtttgaggcagggaagttctggacatgagggagaaccaaggaagaaggaacagagaactggggccccagctcccatcatgcctggcaggctcagggctcagtggcttagctaggggtgagagcgagggaatgagggctggagagtggtcaccccaagcccctgcaacctcctgggtcactgagggtcttcagatgctattctatcctgggtggtggtacctccccaacccagagcaaggacatcctggcatggccagctgtccccaggggaacccctccctcagcctccctcactcctgggcagggaagtgctatagccagctctgggggcacgcctgcttatcctgtgggagtccatggagccggggtggggacagccctccacccagtgcccatacaaggcctggcggagttggggactaattttggcttctgaggcggcactagcagccagggggccagataacgctgccccctgcatgccaaagtccccagaacaatcaccaggtttcactttgttcctcgttaaaaatagcccagtggccaccctggtcaggttaccgtgggtggcttgcctgcctccacactggttttattatcccaacttagggacagctgtccttccggcccacccagcttgagtttcatcaggggccgaaagggcattgagtggtcactgactattgttactgagggtcaccttggtcctgaagggggtgcccacctgtcaccctggccctgagcccagtcgcagtgaggccagctgggtcacgtcagggctttgggggcagggagggaggactgagacctccactctgtggcctggaaatagccagcctcctccagctccagccttctcacctgtggaatgggttggttcctacgcagcagctatacctgagtctgagaccttgagattccctttccttctaggtagagcagctgacagaagagcagaaaaatggtgagaatccctatcacacatgtgggagaccagcgggtccaggctggcatggggaccccttatcagaagaggaccccaggccagagaccagaggcttggtccctcttgctctgccctcagagaggtctccgagggaggtgggcaggttggcaggtggccccagggttctggccctccgtggtcctggctgctgagccctgactaccgtgccccccaacccctgaacacagagttcaaggcagccttcgacatcttcgtgctgggcgctgaggatggctgcatcagcaccaaggagctgggcaaggtgatgaggatgctgggccagaaccccacccctgaggagctgcaggagatgatcgatgaggtggacgaggacggtgagcccccctcctccccaggctccagaagaaccccagctggctgggggctggaatgctggctctgtttagctgggagcaatttagcctatccgagccttggttgcctcatctataaaatgggcataagggctacacaagcctggcgtttggtgtgaggatgcggtgagaacatgggggttcgtgtcgaaggtgctgcctgcagtacctaccctggcctctgtaacggccatgctgcccacccccaggcagcggcacggtggactttgatgagttcctggtcatgatggttcggtgcatgaaggacgacagcaaagggaaatctgaggaggagctgtctgacctcttccgcatgtttgacaagtgagcacgtgacccttgacctctgaccctgacccacactcaagccgagctgtacaggagggcagtctcagattccaggcctagggaccctgtggcctctgcctgataggggagagggatgccccatctcccagtgtccctgctctgcctcctggggcatgggtggggctgcctcatgccctccccacagccctaccctgagccccctccccacagaaatgctgatggctacatcgacctggatgagctgaagataatgctgcaggctacaggcgagaccatcacggaggacgacatcgaggagctcatgaaggacggagacaagaacaacgacggccgcatcgactatgatggtaagcgggtgggtgggctgatctcctgcctccatgccctgcccagcccctaccctcaacccacacctgcccctctttccacagagttcctggagttcatgaagggtgtggagtagatgctgaccttcacccagagctgcctatgcccagcctccaactccagctgagtcctggggttggggagggggtcggggtcccaggacctgagcctggccatgtcctcaaccccaaatcccccgactccctccccagatctgtcctgggggatgcaaataaagcctgctctcccaaggtctgctatctggctctggtgtccctgggccgtggactcatccccaggacccactcttacccaatggccgcttccttccctgtcctaggcaggctggctgcagagcctggcgcctgaccaccgctccacactgccttctgcaggggggtgagatgagatcggagactgccgtgtggcctgccctgct

SEQ ID NO: 220 - DNA, 459 bp, Homo sapiens
  misc_feature: n=a,t,g or c
acaattgttttattcaaaggaaattaaatacaaatgtatatttttcattaaaaatggggatttaaaaatagttttataattagtgttatgttgctttatcttatctttgcataaattatgtattattaaaggtttctgatatccatatacattctagtcttttttaggcagctatgagaagatttcatattcaaaagccaatgccacttttctaaagaaacgatctttgtgccaaattagtacgacaattgctccaaatctctggtcttgacttccggttgtgtgaagagcagtgttttgtttttttcagagaagggaaagagccttcattctttaggtttgtttttgcctcaaagacatttctatatgggtatctaaagttttagtttataagtctcataatgatttgacccatgcagtccaacttttagatagtatttccataccccccaaaagcnt

SEQ ID NO: 221 - DNA, 445 bp, Homo sapiens
aaattttcttgattttaaaaaatgtatttgtgttttgcaggttggaacgcaaacccagtctggccacgtcccgtgaagttgtggacaaaatgtttcagtttctgttcacctctgtgcgtgtgtgtgtatgtgttgtgtgcatgtgtgtgtgtgtgtgggggtgggggatggggtaggtatgtgcttttggctcatgtttgtgatgataactgaagtcttttgtgggtccgacctgttgtagggtgtgggggaaagtgaaggaagagaatgaaggtgagtccccgccgttgcaaaccttcaccaaaccacgcggcccagttttcgtgagtacccctgtgtcccagagaggaggacccagcgtcctcggctctgcgcaaggctttcttggtctggtgggtactcgaggcagttgagaaccttgctgagctgagcgggcacctcgcct

SEQ ID NO: 222 - DNA, 511 bp, Homo sapiens
  misc_feature: n=a,t,g or c
aagccagaacttgtttattgaaaaagcactaaaacaaaatattttggtaagatcgagcaagaagacacaaatagagaatggaaaaatgaaaattttataaacgcagttgaaatttgaaaatgtgaggatattatgaacaattcatttgaaaactgacaaaatacacaaattactacgagtattttactcaaactaattgaagatagacatgtaatcccacagctcctaaatagtttcagtaattaaaaatttcccccaaagaaaagccttttatagtaagttccactaacctgttccatatggtaccaattcttaatctaacagttaacagttcattcaaaataatgggcaacaatgtatttggattttgtacacatatatttgtgtgtgtgtgtgtgtgtgtgtgtgtgtatagtcgtcatacctaggggtgcntatatataagtggaatggacagcnatgatacntgggataggaaagagaaattaggattatttttggtaccataagg

SEQ ID NO: 223 - DNA, 417 bp, Homo sapiens
  misc_feature: n=a,t,g or c
caccantgaacatttattgagtgtccacatgtgcacagctttgaacttggcgatcacagaacgcactgggggagggaagcaagggatcaagagtgtgtgtgtgtgtgtgtgtgtgtgtgtgtgtgtgtgtgtgtgtgtgtgtgtggtccccctgggtttataagaaaggtagtccctgctggagccgccagtcgcgtctctgcagagaggagtcatagcaggggtgggagttaaagccaggcaccacggtggcagtngggaagtgtccctcctgttcctggctccagcagcacagatggcaccagggggacaggaatcagatgctcaggtntccaagcagggataaggacaggcaaaataaataaccccccaacccccatncgtcactctgctgcaacacgacacaaaggtttaaag

SEQ ID NO: 224 - DNA, 396 bp, Homo sapiens
  misc_feature: n=a,t,g or c
ttttttttttttgaagtaaatatctgtttaatttacaaacatcagcagtgtaaccgatattaanctggagaaagacaaagcacnctgaattatacatgtacatctaatttnctttgtaaaaaaagaagttttcaggaagaaacatctgcatctttacagggcaccctgggattttaatgagggaagagcacagttcactataaaccattatcaattctacattgtaatttagcagcaaacatnttaacangggngcattaagataataaaggggttttatngtttgagggaaagaaaagtcncagttcttgatatgacagtctttttatccccacctcacccccagaaaagggcaaaaaaggtcaaggacatattaatttgcaaaaggtctacttt

SEQ ID NO: 225 - DNA, 354 bp, Homo sapiens
agtatccttttatttttttttaaagcacaaatgcccacacaactttgacttacaaggtagttctatatagaataaattaaaatgttagtaaaatctgtattaaaaactatgtacaattaaatgtggtttacagggtacataattatgcttctcacatcaattatagttgaggacaattatagttgaggttatctaaaagaaagtgtaatacggacatgaccattcataagtaaaaggctggaagtctccctggagtttatgcagatgatttttacttgttattgcacagtgtgaattggtaggggaaaaaataatacactaacccctggggcccatacaggcaaattaaggatt

SEQ ID NO: 226 - DNA, 367 bp, Homo sapiens
gatttaaataggtttatttcttcatttacaagaggaatatatttggcttctctcttaagactctgagattcacaatcagcagctctaaaaaataaaggagcagtttggcttccggaagaagaggaggcaacactcggacctggttcttgtacaacaagaaaacatcgctggggccccgctgaggctggagtgggggtggaggctggtctttggaggatgccacccccaccccatcctcttgtcaggccctcggggtaccccagaagcttggtgggtgagtattccacctgcttacacaccactgaaagccacagccagccagtaactaaggggcaagaagagcattgtccaagctggccctcatgcc

SEQ ID NO: 227 - DNA, 517 bp, Homo sapiens
  misc_feature: n=a,t,g or c
tcattgttaaactcagtttaatagaataaatattcaaataagaattgactataccaatattccagtagagaaggaataagctgatagacgtgtctttgagttctgtcaggcaagacttaaccaaatcttgacacacggttaaaattggttgttaatgaaaggtaactagataaaataggtatatatttgcttaagaacattttaaaaatatttctttttttagatttggaattcacaataggtttcttccgttcctcctttgtaaattatgaaatatttattgtttagactgagtaatatgacatgaaacaacaaacctgcacatttctaatttataacaaatctgnttccttaatgggtggaaggaaatctgaggacagttcnaaggagtcctggtctgcttttccagtgcggatcttcnaggtcctacnggaagaccataccctctccagattgggcctttccccttccttctcctctccccggtcaacgtcaatcacatgcaccactccagggn

SEQ ID NO: 228 - DNA, 467 bp, Homo sapiens
  misc_feature: n=a,t,g or c
agaatttacacaatttattaattttagtgttgtacttacaataatactatttaccattgacacagatgcatttcaatagtttaacaattgagacagtcatgctggtctctatcagtgaaatatcatatctgcttataatcccaaccaatactcggatattattaatcttttaaagttttgggaatccgagaggccaacgttgttaattcacatttaatcatgaacgaatttgtgcatctttacatatattacgttggtctttttaccctccccttgaattgctgatttatatccctagcccattttattgatttataaatattaatattacatacatganatggattgtccaagtatttcctttggcccatttnaaatttactggataaatgtttttnttaaagaaaattaagtccctttgtctacataagtcctacaaaatatttttccccaatttggtaggttcg

SEQ ID NO: 229 - DNA, 413 bp, Homo sapiens
tgaaaggaaaaaattcaaagtttattcaacattaagaataacagacagataaaggtttggacttaacagcataaataccaccaatatcatggtgtacaattaaactaacctcatgtcaacttgtacctgtttaacagatgcgatctttgtggtgttgccaaaaggataatggattattgttatgtttggtaaggtgctcaaaattaaagactttatgtcgacttattcacacacatacacacacacacacatgcacgcacacacacacacacacactcttacacttagcctcctgcaaaatgtattgactttagttgctatatccgattcggataaaggctttgctcattttttaaatgacattattaattgcagaaaaaacgtggaggagaccttggccttggcaggtgggg

SEQ ID NO: 230 - DNA, 419 bp, Homo sapiens
  misc_feature: n=a,t,g or c
nttattttaaataaatattttaattctattgttgacatttacaagtagaaagcatacagtatgttacaaatatcaaaatgagaaaaatatgaatgttacataagtaacaaatataaaaaaagtattttcttaccttccctgaaagtaagaaaactattcagcataggaaaatatcagtatcaaaaacacagcttaggtgtaaaaaaagtttttacacagtatttaaaaaaaatgatctacaaaatgacaaagtaagtgttgaaatctgatttcatataaattataaaaactgggtacttagagtaaatgttatctggttggaaaataagtccaatcataagctttccttaggtcaattctttaaaatattaaaagcataccgaaaaattttccaataaataaccttnaagaggggttcc

SEQ ID NO: 231 - DNA, 189 bp, Homo sapiens
  misc_feature: n=a,t,g or c
nagcaagcaaaaaactacctttatatatgatgttattcaaatacatggataagataacacattttatgatgtaaaaagtaatatttaaaaattaaaaggcaagtctttctggtattcagaagtctgaagcaaccactgtccagctctttaaaaagagcacattccattctggtggcacacaaatgtaca

SEQ ID NO: 232 - DNA, 377 bp, Homo sapiens
  misc_feature: n=a,t,g or c
ttttcccagtttcatggaacttttattgagtttatttgtgggatgcatgacaggaggtctttccatcattagtaagaatgaaaggtcattttcacagtcactttggcacacgctaacgtctcataaaaaaaaccagaaaagcaaagacaatnggaacctatagaatacgtcattaaatacatacaaaacactaataaaatatccctgataaaccaaagtgcatatgcccaggacagtattgcaccttccccagtcgcgcgtgtcntcagcatggcctcngtcaaagttggaagttaacagtcgtgagattagtacgcaggtgcacaccagttatttacagaacggcggtcagagcccgggagtaggggccggccgcc

SEQ ID NO: 233 - DNA, 163 bp, Homo sapiens
  misc_feature: n=a,t,g or c
tttatggggcgggaactttttatttgaagcaagttaatcatagcattgccccccagtaccctggtatcctgctacaaggagcatcacaccatttgggcacatggtgtgcntcatccactagcctggcatctcagcagacagcagagggcagcagaagctcagc

SEQ ID NO: 234 - DNA, 231 bp, Homo sapiens
tctatttagatcggattttattttgcaatatttattatatattcaattcaaatgtactcactattgtgctaggcaattgaaagtaaaaagtataaagctgcattttgcgctctcagtgaggtttaagtcagggaaatgaggcatgcacacaaaataacgagaaagtagtataatagctgtgatcattagttatcaaaataagtgaatgagctaataatcattgttagaata

SEQ ID NO: 235 - DNA, 222 bp, Homo sapiens
ggggcatggctaacacctccctgggcctcttcttcctaccttgattgagggtgtgatgcctggagccacagcagccactttgctaccatgacaaaaaggccaagagaatcacagagtcattgaccctatcattatttcaccaagccaataccagccgccatccttctccagaattcttgtaaataaaataaatccctctttgtttaaaaaaaaaaaaaaaaa

SEQ ID NO: 236 - DNA, 527 bp, Homo sapiens
  misc_feature: n=a,t,g or c
cctctgccacaaaagacctttaatggcctcctatttattgttcttttgttcatttgttagagttgaatgaactataataacttgtctgacataataagaatgccacaggtataacagataaacctggcaggtggtccaggaatgagagtgtcacaaaataatcactcaacacaagggccacagacctggagattcttcccagccatccctcactcctgccccaggacacaacccatgcaggcccccattccataggaagaggcaggtcccacagtgtctgtggctagaccttaacactgagcagagatgcccgggaagatggcacttcctatgctcgttcccaagtgctctgctcatctgccatgcaggtcaggaccataccccgagtttgtgaggcacccacctctcatactcaccacctcatatgaccacctatcatacccanctctcctatgacccttgcaattgtcccagtgaagtgggaagagctggactagcccattttgcacacagggaactaaggacac

SEQ ID NO: 237 - DNA, 298 bp, Homo sapiens
atccagtgtaaaaaggaagttggaatgggagttggcgggcagtgaacgagtgtggggaaggattggtgctggggcaacaggaaggggccttgggcgtttggctgcactaactttggtagctcagtgtgcatctagagtgggacttgggagggagctaagcttgggctgggctgcttggggcttggcatagggtggaaagggctacctggggctctgaccacactgtagtatgtgtggaggggcctcccgtctcccacaacttctgctataacaataaactgtagaggatcttaaagag

SEQ ID NO: 238 - DNA, 447 bp, Homo sapiens
  misc_feature: n=a,t,g or c
aacagggcggctttttgttttatttctgtttttttccctttttcttaaaaaaattaaataaagttctcattatttccccaatatacatcaaatgagttttcatgcaaagcagcagtcacagaggcagaactgtccccagctcgtgcctctcggcttgaagaaccaccttctcccggccccgggttctctggtgttctcactgaggatggacgacgcccactgtctctcccagctggaactggctatgacgaaacttggctggcgtagggagaggagtcctcccctctccccaggatgggtctcaggggacagcaagctctggggctgatcnccatcattgtccttccatctgagatcccagtgtgacanttggaaagtcctcttcccaggaatgcgaggtccnctctcagtctcaatggaatgggataatgagtgtncacctataag

SEQ ID NO: 239 - DNA, 510 bp, Homo sapiens
  misc_feature: n=a,t,g or c
ttttttatacaaacaagtttcttttattgtttccacacattcataataactatagaacagaaagattgttttaatttgctgtcctacttcggtgacctgatgaatacactggtaacagtccccagtttgagtaagatcagttgaagcccttactgtataagtccaaaatttaagaaaaatgaatctcacgatgagcttcctcaggcttcggccgtgcgtggaccagtcagcttccgggtgtgactggagcagggcttgtcgtcttcttcagggtcactctgaaagggttgtctgggcttggtcttgcctcccaggtttcacgcgctgcaggttttacatggctgtggtggatccaggctgggattccttctacttcacagcggtgggagggctcagaacgacagctggggtctttccacagtggacacaaagaggtacgttccagttcttgatcaaatngatcactggggagaaaaggtgaactggggagaataantaacaggccattta

SEQ ID NO: 240 - DNA, 215 bp, Homo sapiens
  misc_feature: n=a,t,g or c
ttttcagaaattgaaccgtttattagcctaggtctgggtttcaggcattgcggagnacgtctggggagctctatgaggggaaacaagcccctgactggctccttgccccccaaagacccgctcccccaggctttgcattcacaagaaattactctgaggcatgaggtttccttccccaaggtgagctgcaccccagctctccagtgggaggatgg

SEQ ID NO: 241 - DNA, 457 bp, Homo sapiens
  misc_feature: n=a,t,g or c
ttttttgtgtgaaaagccttcattgtgcaagcgtgcccancaaacaaacaccaggtctgcgctggccgaagacgaagcgtcctccctggagtcgggaacaagtcacctctgaccacacctcctctgacgccatcacctcctcctggccccacccaagggctcgacacaagccccaaggtcggggggagaggggcggggcggaaccgagggcggaggcaaggtgggattccaggaaggccttccgaagatgggacggtgggtcctgtccctccaggtagcttgtgggtgtggacagcaggacttgctggctcagtgtgggcacaaggacactgtgccactggttgagtgagtggtgagggattggaggtggctcccagaggactccatcttgcatggccctggccttgtggcttccagnaggcttgccctggctgtgggtaagccangagcanatgcg

SEQ ID NO: 242 - DNA, 440 bp, Homo sapiens
tttttttttttactttcatgcaaaatctttatttggaaacatgtatgttactgagcaggccagccgccatcctgaaatagcaaggatatttacactgtgcagagaaatacaagagcttcttgaagacattcatctgtgctttgccggcattttatctgctactttgtcctgcttctctcttccctgtgctcattattcttcatgcaccctcacctctcatcaccttaaggcatcctgtaccagcctgatctgggggcgatgactgcagccggcaatcggcaattaccaatggtgtctttctgggaccctttctacctgtcttaggtattaatggtgcccaaagaaaaaatgaagagatgaaagtttctgtggttagctgggcatgggtggtgtgcacctgtagtcccagctactaaggaggttgaggtggggatagtgct

SEQ ID NO: 243 - DNA, 295 bp, Homo sapiens
  misc_feature: n=a,t,g or c
ttcgtaaaacnataaaacaatggtttctagcaagtaaacaaccaactgatcatctctttttacctttcgtagatgttttcttcttaaaacatatagttatatgtttagcttacatatttatgtatattatatatcaacacttaaagaataataattagattcacagagtacggtgggaaatacaatatattaccggtacactattcaggcaagcttatgggaatgacaaaaaaggantgaatcacttttcatgactaggtatcttaattatcctctggtttttttctgactaagg

SEQ ID NO: 244 - DNA, 358 bp, Homo sapiens
  misc_feature: n=a,t,g or c
tgttaagtacttaagatttattgaatgagaactgcattgtacaatatggtgccactagacacgtctatttaatttaaattaaaatataaaactctaaaactagccatgattcaaaggttcaatagctatatgtgactagtggctaccatataaaacatttccatcacaaagttccatttatcagatcttatataggaaccttgantaaaatttaatagacaagtgattttgtatttaacatttcacctttattgaatgccctatagggccatttgaatacgggtcatgtncaaggcacaggggaaaaaaaaactgcagcnggtaagggttttncaggggggttttccaggtcccctcc

SEQ ID NO: 245 - DNA, 364 bp, Homo sapiens
  misc_feature: n=a,t,g or c
aataaagaaaaaantttccatccaacttgaagaaaaatcagaaagtatttttctccatggaccattattctatttgaacctaacctgaattccctcatagtcaaaacctgccatgatgatgtgaattcatttccgcatagtcggaataatttttgctccaaattcttaaaggagacaatgaattagtagcttgtaaattttgcagatctgggccttcaataacttagtaggaagggcaataaaataggaggggaaaaatggggactgtgggattacaactgtttcaaatttcatcttaatttcttctatttttctcaaccatatttcttctatttttacaatcattattaaaatatttccctaa

SEQ ID NO: 246 - DNA, 384 bp, Homo sapiens
  misc_feature: n=a,t,g or c
ttttttttttttttagctcaagaacaagtttttattatgcattgggtttcgcagtgatacaagacacctgctcacaacttacagtattaattttttagaaaaacaaaacaggtatatggcatgagtgaaacagttccccattaaaagcacttaaaacctatgacatggctagtaagatgtaaaatattaagtccccttgggtcttgcaaacttgtatttcctaacaatttggaagccatgatgatagtctgaagctaaaggaactccaatttcttggnatgatactaaataaagattcttatcttttggggagaaagagccaaaacagaagggtntgaaagcagtgaatttcccctccntatggccaataaagcaagaggggca

SEQ ID NO: 247 - DNA, 239 bp, Homo sapiens
  misc_feature: n=a,t,g or c
tttttttttatgtatttccaaaatcacaaaatgcacaacattcatngtttttaatattgcaacatggaatattatatacagattaaaaccacgacagcaaaaacactcacacggtaccagtttcatatcaaaacaaaacacacaagtgctttttcaatattaaaacgactgtgataaaaacatattaatattttgaaccatgtttacaatagngcaaaattcatattttactaaataac

SEQ ID NO: 248 - DNA, 469 bp, Homo sapiens
  misc_feature: n=a,t,g or c
ttttttttttttttttttttttttttttttactatttaaataattttatttgtttcancctttggnagatgagaaaaatacattacaaaatacattatacagaagacagctcacagtacacattactaaaaacacaatctacattccagccagggctggtgggtaagttcagaagaaagccacagaggccttggaaaaccagatttcagactctatgggantggaattttccccttatgtcccgtctttatctcaacctcaggcatgttttnttaggcacccctaattagggnggggtgtggggtaggagttaggaggcaggcattgaggtggggactgggngggacttctccattccaccttaaaggcaggcaaacctttaaaagtcccccccaaaaggnaagggggtagggggaggggggnaagaatgggcccaatgtggaantttgccgtgttctncaaaggcttt

SEQ ID NO: 249 - DNA, 312 bp, Homo sapiens
tttttttttacttgaaaaaattcacatttatttactgtcaaaccgtgttaaactttacactggatattagtgatgggctcattattaacaggtttacacaaagggatgaaaaaaaagcagaattttgctgaaacaatttacatttcattagaactttatcataaaataaattaattactaaatataggcagaaggaatatggaagagtaatatttatgttttattttatttttttaaaaaagaataggcaccttttgttcactagaaagtttgtgagaagtgcccagtgccctctttgccctctgttcagga

SEQ ID NO: 250 - DNA, 485 bp, Homo sapiens
  misc_feature: n=a,t,g or c
tttttttttcctttaaaaaaattatttttattgtggtaaaacatatataacataaaatttaccattttaaagtacacaattcattggcattaagtgcattcacaatgctgtataaccaccacaacggaacttttgttatagagcttttcttcatcgctatgaaggagtaatccttttaaacataagtcacaggcatgtcactaccctgcccgcaaacattcagtgggcttcccatcttggctcagcaaggggacaaagtcctggccgtggcccacagagcttttggctgtcctctctgaacgctctcttcactcatttcacccggtcattgggcttccttggctggtccctttggacaaagtggaccctggctttctccttcaggggtctctggcatgtgtttttttcctttgctgggaatgctctttttccntggganatccatgtantccccatttcattcaggagctntcctnaggatatca

SEQ ID NO: 251 - DNA, 566 bp, Homo sapiens
  misc_feature: n=a,t,g or c
taatctttagaacttaaattctacaagaattttaaatattttctgtatataattatgacattgtcacacagaaattacacattttatgtgccagaagccttaaacatctttctgtgaaaatgctgatatattgtgacagttatttcacatttgatatgtagagaggaataggggttagtttatgtttatattgaaaaactttaaagactatttggaagttccagaaattctggttttaattcaagtaaaatgataaaatagtcattatatagttcagatgctaatattctaagtaataatatatatttacattgaagctaaaactgttaagccaaaacaatgcccattttgtcggcttacagctcttccngagtctaggagccngttgggggttcngtcccnactttaaggnttttaattggcccacttatttccgaaaggnttggttccaaccaggtggtattaaaattggtttttcnctaaaacnactggggtatcnggcccctggggggttttttttncaatttnattaaaggccggtgnatatttgggggggccttttaaat

SEQ ID NO: 252 - DNA, 262 bp, Homo sapiens
gtaggctttcttgtttaatagcagttaaaagaggaaaatgtacaagaggaataaacatgctcttttcacagaggagctttcccctaaccatgcggcccatctgtatcagtagctttacaagtaagttttagagaaaaaagttccctttagagttaaaaatggactttcctaattttctctatatatgtgcaactatctgtgtaaaataaaaatgccatttccaacacctttgtgaaaaggtaattgtgaatgcagggcaaaa

SEQ ID NO: 253 - DNA, 294 bp, Homo sapiens
  misc_feature: n=a,t,g or c
taganaattnnctgtaggtgttcctttattttatcaaaaatagtaattttgtataattntaaatcaggaaatctaaggggacatgttacccaatcacaacagctaataaaatgcctcccattacagacccagctttttaaatattcaataacattcacagaattggcaagttagtctccaaaaaattctaacagaaactgcaactcaaaaagtgtgtctatatcagagatggtggtaacttcctcaaagaagttacatgcaaatncccaggggtctcatggtttacaaggtgac

SEQ ID NO: 254 - DNA, 401 bp, Homo sapiens
  misc_feature: n=a,t,g or c
acagtaccatagtattccactgtctagtatactataagtganctatataccaataatgaatacttaaggttgtttcaaatcttttattattagaaaagtgctgccagaaacatccttgccatgcttctgtatgtactggtgctagtgtttctatcagataaatttttagacatgaagtgaattactaggcataggnaatataatttacacttttgatagatactgagtttttgctcatttgctacatgaagcagaggcagagtattctgtgtggggtttgggacaggaacactgacccctgaagtcgagccggggggtctaacataggtgggtcatttgtccagcctgttttatgggaagggaactgggactctgagctttggggggaatttcccgcaagg

SEQ ID NO: 255 - DNA, 396 bp, Homo sapiens
  misc_feature: n=a,t,g or c
ntanacccatactttttatttgttaatttcatcacccccctcttcttctgatgtggtccccaccacctctgacatgcacgcattggctagggcctctcacactgaggctccacgcgaagggaagatgcaaagtccagtccctccaggagctagtgatggaagtcttgggaaaggagagtcccaagttcaagaagacagctagggtagaagggagggaggtcctcaaggggtagaggacaggagtccaaggaggtgggctcaggntgcggggtgggcgcctcagggagagcccagaaatctttccaggggcagcactntcttggaacaggggctnttgcacttnacgggtaccccgcattttttcattccccaaccttcagttgggccccccattgc

SEQ ID NO: 256 - DNA, 231 bp, Homo sapiens
atttgaaggttaattacacgggcctttttattccatctggaaaatacaaatattcacaagagtctgtacaaccttagggacaccagccctggccctgccctcagctgcatgccaccctcatatcccacccccatccccagcctcctgccccgacacccccaggctccctgctctggttgaagtattttctccaaggcaggaatgagtccttgatccaaccacagcatctat

SEQ ID NO: 257 - DNA, 319 bp, Homo sapiens
tttcacagatacatatatatacttttaataggaaattagtgctcaatactctgccctttgtgtgggggaaaacattcttttatacaaggatttttacctagctattacaatagtttaaggtaatgtacaatatatatttgacacagagagtgttattagatgttcgcactgcataaaatgaatcctctagcctttgatgtcttaaaaagaagttttacaactattagtgaagctaaggcactacatattttccttccacaatatggatttgtgtcatttaaactgaagaagttggatctttgtggtgatgacagggtat

SEQ ID NO: 258 - DNA, 349 bp, Homo sapiens
tttatttaaagatttaaggtttttttaattcagtaaactttatttatatataacaacagtacaaattgtgtcctcagcttgcaaaataggagtgtttcatatttacaataggtacacaataatatattagaataacaaaaaaccccactttattggaacattttaaatacttaattttcttacagtttttattccacaacacctgtaaaaacaacaaaaccagacaaccatcattgtattttcttaaaaatatatataatacagattccagtgtgtttgaggagtgggtttgagcaggaaaagttgtggggaaggcaggtgggctccggcccctagtctcatgggatag

SEQ ID NO: 259 - DNA, 349 bp, Homo sapiens
  misc_feature: n=a,t,g or c
tttcaagtttaatttttaatttattagaacccagtaaatgatgattttaaaagnagagtttccatcaaattaacacttaattcagggcaaaanttcatttaaaaaaaatatttnttaaggcagaagtaaatnattataaaaatagtttgtctaatacagactgtaaaatgtcagatttttaagagattcacatagtattttatagcactaaaatattaatacagtcagaaatattatcaattggtccaagatttctgtttataaaatgtctagactgctaattgaagaaatgttgctgtataagtaatagctacaatacaaccaaccaagtggattgttttttatgaca

SEQ ID NO: 260 - DNA, 338 bp, Homo sapiens
tttttttttttttttttcatttttcatgaccatttttattaaaaaataatttagttctgggtgggaccatttcaggaggcagggattggggctaggggctgggcggggtggtgggggagcggatctcacttttctctttttcaccctctgcccagctggcctttgctctggagaggcagtctctttcctcctgccttcctgagtaaggcaggattggcagtggctgaccccagccctagctatttagggaggcaggggcagagatactaggcaaatgagaaggggtcagagacacagggcggcttagaagatttgaggtctgaacatgagaaatgagg

SEQ ID NO: 261 - DNA, 523 bp, Homo sapiens
  misc_feature: n=a,t,g or c
ttggtntgggggnactttaaatacatctttattgtctgaattttttacataagaatatatcattttataaattaaaataaaatttcaaactaagtggtaagagttttaaaatctctaaactgtatagatgatagagagagaaagatctagattggtccatagttatttctaagatacatttactgaaagttgacactataggatttggctgacatgacaagaagaacatgaagaaaattatccttttaggattaaaagaaaaaagcaactaatttcgaatcatctagggtaaaatgaattaatataccttgaatgggaagtccacaccaatttcaaattggcctgggtacttcatctgccctctcttctttgctaattggccaatttgctaagggatgaaccaggacacnggatgccttttatcagccgggaatttcacctacccttttcgggactgcctcaaataagggtttccaccnatttaggcctgccctcaaggagncctgagccngggaggtctnag

SEQ ID NO: 262 - DNA, 298 bp, Homo sapiens
  misc_feature: n=a,t,g or c
cttcaacacagcagaaatttatttcccacccaggtaaggggaccctgaggtaggcagtgacttctgtcggcagcgaactaggccctctcaccaggctgccctaccgtgctcagtgctgcctcatggtgcaaagtggttgctgagctccagtcatcactttagccngcngaanggggaagggnangggnaaaanntttcccccccnctngggggatttctttncnnncccccagtnaggattttgngtttattataaggnaagaagagacagttagcngaggcttccctgtccaccagg

SEQ ID NO: 263 - DNA, 492 bp, Homo sapiens
  misc_feature: n=a,t,g or c
ttttttttttatcagactaagcaacttgatgaccaggaccatatcccctatttcttagtattctcttcagcattttagccagagtaggagtcggtgttgaatacaagtttgtcatcttatggattatatcttagggtgaatatcagagctggtgtccatcatgtgaacaggcagcatggtactggtggggagaggggtggaagtacagagtactagggccccaggagctaatattgctaacttgacaatattggtaaaagctagaccngttaagaactaccngcaatggttagtactgaaagcaaaaggggaaggattcatcaggctaaaataaaaaggggaaactagcaggttgggcataggggcagaacccangggaaaaccaaaaccaaaaccccccaaaaaactactaggatttccccgaaaagtggggaaaagcccnaaatctccaggnccatttaatgacagccaggtatttnccaaatgtagggg

SEQ ID NO: 264 - DNA, 493 bp, Homo sapiens
  misc_feature: n=a,t,g or c
tttccaagccaacatttattnttgcacaagcctgttgcagtcctgaggggatcttctggcanaggtntgggtaggagctgagtggccactggggtgaagggagacagaggaggctntgccagcaggntcctatccagatgatacatgagatggaggctcctcagccacactccagggagggtggggtggcaagggggattcagggataatggcattaataatacaagtggtaaacaaataaccaagaggntctggctggttacgntacacaaaanttagcagtaagagtccgtgctttcacattcctatcagacagatctgagttcaaatcctgtatgtntagcagggtgaggtatctgctttctttcagagcccatgggtgcacatctctgagcctagttacaacagttggcacataggtnggtgacaaggagggcagctctttgattcctgnttgcttccacagcacagagagttaagtatggctggtnta

SEQ ID NO: 265 - DNA, 2512 bp, Homo sapiens
caatgcactgacggatatgagtgggatcctgtgagacagcaatgcaaagatattgatgaatgtgacattgtcccagacgcttgtaaaggtggaatgaagtgtgtcaaccactatggaggatacctctgccttccgaaaacagcccagattattgtcaataatgaacagcctcagcaggaaacacaaccagcagaaggaacctcaggggcaaccaccggggttgtagctgccagcagcatggcaaccagtggagtgttgcccgggggtggttttgtggccagtgctgctgcagtcgcaggccctgaaatgcagactggccgaaataactttgtcatccggcggaacccagctgaccctcagcgcattccctccaacccttcccaccgtatccagtgtgcagcaggctacgagcaaagtgaacacaacgtgtgccaagacatagacgagtgcactgcagggacgcacaactgtagagcagaccaagtgtgcatcaatttacggggatcctttgcatgtcagtgccctcctggatatcagaagcgaggggagcagtgcgtagacatagatgaatgtaccatccctccatattgccaccaaagatgcgtgaatacaccaggctcattttattgccagtgcagtcctgggtttcaattggcagcaaacaactatacctgcgtagatataaatgaatgtgatgccagcaatcaatgtgctcagcagtgctacaacattcttggttcattcatctgtcagtgcaatcaaggatatgagctaagcagtgacaggctcaactgtgaagacattgatgaatgcagaacctcaagctacctgtgtcaatatcaatgtgtcaatgaacctgggaaattctcatgtatgtgcccccagggataccaagtggtgagaagtagaacatgtcaagatataaatgagtgtgagaccacaaatgaatgccgggaggatgaaatgtgttggaattatcatggcggcttccgttgttatccacgaaatccttgtcaagatccctacattctaacaccagagaaccgatgtgtttgcccagtctcaaatgccatgtgccgagaactgccccagtcaatagtctacaaatacatgagcatccgatctgataggtctgtgccatcagacatcttccagatacaggccacaactatttatgccaacaccatcaatacttttcggattaaatctggaaatgaaaatggagagttctacctacgacaaacaagtcctgtaagtgcaatgcttgtgctcgtgaagtcattatcaggaccaagagaacatatcgtggacctggagatgctgacagtcagcagtatagggaccttccgcacaagctctgtgttaagattgacaataatagtggggccattttcattttagtcttttctaagagtcaaccacaggcatttaagtcagccaaagaatattgttaccttaaagcactattttatttatagatatatctagtgcatctacatctctatactgtacactcacccataacaaacaattacaccatggtataaagtgggcatttaatatgtaaagattcaaagtttgtctttattactatatgtaaattagacattaatccactaaactggtcttcttcaagagagctaagtatacactatctggtgaaacttggattctttcctataaaagtgggaccaagcaatgatgatcttctgtggtgcttaaggaaacttactagagctccactaacagtctcataaggaggcagccatcataaccattgaatagcatgcaagggtaagaatgagtttttaactgctttgtaagaaaatggaaaaggtcaataaagatatatttctttagaaaatggggatctgccatatttgtgttggtttttattttcatatccagcctaaaggtggttgtttattatatagtaataaatcattgctgtacaacatgctggtttctgtagggtatttttaattttgtcagaaattttagattgtgaatattttgtaaaaaacagtaagcaaaattttccagaattcccaaaatgaaccagataccccctagaaaattatactattgagaaatctatggggaggatatgagaaaataaattccttctaaaccacattggaactgacctgaagaagcaaactcggaaaatataataacatccctgaattcaggcattcacaagatgcagaacaaaatggataaaaggtatttcactggagaagttttaatttctaagtaaaatttaaatcctaacacttcactaatttataactaaaatttctcatcttcgtacttgatgctcacagaggaagaaaatgatgatggtttttattcctggcatccagagtgacagtgaacttaagcaaattaccctcctacccaattctatggaatattttatacgtctccttgtttaaaatctgactgctttactttgatgtatcatatttttaaataaaaataaatattcctttagaagatcactctaaaa

SEQ ID NO: 266 - DNA, 1908 bp, Homo sapiens
gggacgtcagcggacggggcgctcgcgggccggggctgtatggggctcccgcgcgggtcgttcttctgggtgctgctcctgctcacggctgcctgctcggggctcctctttgccctgtacttctcggcggtgcagcggtacccggggccagcggccggagccagggacaccacatcatttgaagcattctttcaatccaaggcatcgaattcttggacaggaaagggccaggcctgccgacacctgcttcacctggccattcagcggcacccccacttccgtggcctgttcaatctctccattccagtgctgctgtggggggacctcttcaccccagcgctctgggaccgcctgagccaacacaaagccccgtatggctggcgggggctctctcaccaagtcatcgcctccaccctgagccttctgaacggctcagagagtgccaagctgtttgccccgcccagggacacccctccaaagtgtatccggtgtgccgtggtgggcaacggaggcattctgaatgggtcccgccagggtcccaacatcgatgcccatgactatgtattcagactcaatggagctgtgatcaaaggcttcgagcgcgatgtgggcaccaagacttccttctatggtttcactgtgaacacgatgaagaactccctcgtctcctactggaatctgggcttcacctccgtgccacaaggacaggacctgcagtatatcttcatcccctcagacatccgcgactatgtgatgctgagatcggccattctgggcgtgcctgtccctgagggcctagataaaggggacaggccgcacgcctattttggaccagaagcctctgccagtaaattcaagctgctacatccggacttcatcagctacctgacagaaaggttcttgaaatcaaagttgattaacacacattttggagacctatatatgcctagtaccggggctctcatgctgctgacagctttgcatacctgtgaccaggtcagtgcctatggattcatcacaagcaactactggaaattttccgaccactatttcgaacgaaaaatgaagccattgatattttatgcaaaccacgatctgtccctggaagctgccctgtggagggacctgcacaaggccggcatccttcagctgtaccagcgctgaccccaatgcactgagcgctttgcttcttcaagagttgcggccctgatcctctcaagtggccaaaagcttttttaacttttcaatcttcaccttcccttgccaacagagggcactggggtgaattcaagattttcatcgaggtctgttcaatataggacaccccagcttgtccttggctcatccaagaactcttctgtatctaaaacaatacatctcaatcttggccaagggaaaatggactgctttgctggattggcactgagcaactttaggaaatgtcggtggagtgttcagcaagatcagacagcagtccaggtcaaaggcaaacacacacgctccagcccaaatcctcctggtggcacatcctaccccagatgctaaagtgattcaaggactccaggacacctcttaagagcctttctaagaacatgataggcttacttctgctccataataaagtgggagaaaaaagccagaatataacttaagactagataactgcgtacatgatggaccattttttttttttttggctgggtagagaaatcatataaaacgcaggctgtttagcatggagatgactctcagaacactgggagggtctggcacttgatgggggttagttgcttggcagcctgcctgccactgagggaagtcccattagagatgtatcaccaccttgtcaccaacaggatgatgtcaccaacaggatgatgtcaccaggtaataaaccttcatcctcac

SEQ ID NO: 267 - DNA, 3100 bp, Homo sapiens
actcgtctctggtaaagtctgagcaggacagggtggctgactggcagatccagaggttcccttggcagtccacgccaggccttcaccatggatcagttccctgaatcagtgacagaaaactttgagtacgatgatttggctgaggcctgttatattggggacatcgtggtctttgggactgtgttcctgtccatattctactccgtcatctttgccattggcctggtgggaaatttgttggtagtgtttgccctcaccaacagcaagaagcccaagagtgtcaccgacatttacctcctgaacctggccttgtctgatctgctgtttgtagccactttgcccttctggactcactatttgataaatgaaaagggcctccacaatgccatgtgcaaattcactaccgccttcttcttcatcggcttttttggaagcatattcttcatcaccgtcatcagcattgataggtacctggccatcgtcctggccgccaactccatgaacaaccggaccgtgcagcatggcgtcaccatcagcctaggcgtctgggcagcagccattttggtggcagcaccccagttcatgttcacaaagcagaaagaaaatgaatgccttggtgactaccccgaggtcctccaggaaatctggcccgtgctccgcaatgtggaaacaaattttcttggcttcctactccccctgctcattatgagttattgctacttcagaatcatccagacgctgttttcctgcaagaaccacaagaaagccaaagccattaaactgatccttctggtggtcatcgtgtttttcctcttctggacaccctacaacgttatgattttcctggagacgcttaagctctatgacttctttcccagttgtgacatgaggaaggatctgaggctggccctcagtgtgactgagacggttgcatttagccattgttgcctgaatcctctcatctatgcatttgctggggagaagttcagaagatacctttaccacctgtatgggaaatgcctggctgtcctgtgtgggcgctcagtccacgttgatttctcctcatctgaatcacaaaggagcaggcatggaagtgttctgagcagcaattttacttaccacacgagtgatggagatgcattgctccttctctgaagggaatcccaaagccttgtgtctacagagaacctggagttcctgaacctgatgctgactagtgaggaaagatttttgttgttatttcttacaggcacaaaatgatggacccaatgcacacaaaacaaccctagagtgttgttgagaattgtgctcaaaatttgaagaatgaacaaattgaactctttgaatgacaaagagtagacatttctcttactgcaaatgtcatcagaactttttggtttgcagatgacaaaaattcaactcagactagtttagttaaatgagggtggtgaatattgttcatattgtggcacaagcaaaagggtgtctgagccctcaaagtgaggggaaaccagggcctgagccaagctagaattccctctctctgactctcaaatcttttagtcattatagatcccccagactttacatgacacagctttatcaccagagagggactgacacccatgtttctctggccccaagggaaaattcccagggaagtgctctgataggccaagtttgtatcaggtgcccatccctggaaggtgctgttatccatggggaagggatatataagatggaagcttccagtccaatctcatggagaagcagaaatacatatttccaagaagttggatgggtgggtactattctgattacacaaaacaaatgccacacatcacccttaccatgtgcctgatccagcctctcccctgattacaccagcctcgtcttcattaagccctcttccatcatgtccccaaacctgcaagggctccccactgcctactgcatcgagtcaaaactcaaatgcttggcttctcatacgtccaccatggggtcctaccaatagattccccattgcctcctccttcccaaaggactccacccatcctatcagcctgtctcttccatatgacctcatgcatctccacctgctcccaggccagtaagggaaatagaaaaaccctgcccccaaataagaagggatggattccaaccccaactccagtagcttgggacaaatcaagcttcagtttcctggtctgtagaagagggataaggtacctttcacatagagatcatcctttccagcatgaggaactagccaccaactcttgcaggtctcaacccttttgtctgcctcttagacttctgctttccacacctgcactgctgtgctgtgcccaagttgtggtgctgacaaagcttggaagagcctgcaggtgccttggccgcgtgcatagcccagacacagaagaggctggttcttacgatggcacccagtgagcactcccaagtctacagagtgatagccttccgtaacccaactctcctggactgccttgaatatcccctcccagtcaccttgtgcaagcccctgcccatctgggaaaataccccatcattcatgctactgccaacctggggagccagggctatgggagcagcttttttttcccccctagaaacgtttggaacaatgtaaaactttaaagctcgaaaacaattgtaataatgctaaagaaaaagtcatccaatctaaccacatcaatattgtcattcctgtattcacccgtccagaccttgttcacactctcacatgtttagagttgcaatcgtaatgtacagatggttttataatctgatttgttttcctcttaacgttagaccacaaatagtgctcgctttctatgtagtttggtaattatcattttagaagactctaccagactgtgtattcattgaagtcagatgtggtaactgttaaattgctgtgtatctgatagctctttggcagtctatatgtttgtataatgaatgagagaataagtcatgttccttcaagatcatgtaccccaatttacttgccattactcaattgataaacatttaacttgtttccaatgtttagcaaatacatattttatagaacttc

SEQ ID NO: 268 - DNA, 3128 bp, Homo sapiens
ccttgtgcatttggtctgaagacaaagatgactgcaggagtgggcaggccggagtgggggtgacctggcctgtgccaggaaggaggaggagtctgcagccctgtgcggttcaacatccatcaaggagtccagagcaggagccaggccaggcgggagggaaaggccctgggaggggctctctaatctcccagccccgactctgccccgtcactgccgctgctcctcattactcgctggggctgctgtcgcctccccgaagggtggccttgtccagatagtggcaaacctccctgccgtggatgagtcaggagcattttcttaagaggaacatcactggaaaacaaaatgagcggggacacagaaaccaacagcagtggctgcatttgtggtacaggctcctcttccagagctcgctgatgcccacctcagacaggcctgaccacggcacggctggtgggatttgccagtcacctcaaccagccagttccaccctcagcttctctcagaagggagcaccacactcctcaagctcagtgaatgtatcccggcatgggtggggccagagcctgtgatatctcgaggtgggctcggcaggacaccggggtgtggaagggggaagcgagcacctgactcagacagcgcgggagctcgcaggagtcacgaggccacagcgacttcattgtctgactgggcctggacctataaacttcccacctcagccttgggccaagcctggaagataaaaatggagcaccccatggcgcccctcactcagattctcccctgggcttctcccacgcagccccagaagaggacacaccagccccagagttagccccagaggcccctgagcctcctgaagagccccgcctaggagtgctgaccgtgaccgacacaaccccagactccatgcgcctctcgtggagcgtggcccagggcccctttgattccttcgtggtccagtatgaggacacgaacgggcagccccaggccttgctcgtggacggcgaccagagcaagatcctcatctcaggcctggagcccagcaccccctacaggttcctcctctatggcctccatgaagggaagcgcctggggcccctctcagctgagggcaccacagggctggctcctgctggtcagacctcagaggagtcaaggccccgcctgtcccagctgtctgtgactgacgtgaccaccagttcactgaggctcaactgggaggccccaccgggggccttcgactccttcctgctccgctttggggttccatcaccaagcactctggagccgcatccgcgtccactgctgcagcgcgagctgatggtgccggggacgcggcactcggccgtgctccgggacctgcgttccgggactctgtacagcctgacactgtatgggctgcgaggaccccacaaggccgacagcatccagggaaccgcccgcaccctcagcccagttctggagagcccccgtgacctccaattcagtgaaatcagggagacctcagccaaggtcaactggatgcccccaccatcccgggcggacagcttcaaagtctcctaccagctggcggacggaggggagcctcagagtgtgcaggtggatggccaggcccggacccagaaactccaggggctgatcccaggcgctcgctatgaggtgaccgtggtctcggtccgaggctttgaggagagtgagcctctcacaggcttcctcaccacggttcctgacggtcccacacagttgcgtgcactgaacttgaccgagggattcgccgtgctgcactggaagcccccccagaatcctgtggacacctatgacgtccaggtcacagcccctggggccccgcctctgcaggcggagaccccaggcagcgcggtggactaccccctgcatgaccttgtcctccacaccaactacaccgccacagtgcgtggcctgcggggccccaacctcacttccccagccagcatcaccttcaccacagggctagaggcccctcgggacttggaggccaaggaagtgaccccccgcaccgccctgctcacttggactgagcccccagtccggcccgcaggctacctgctcagcttccacacccctggtggacagaaccaggagatcctgctcccaggagggatcacatctcaccagctccttggcctctttgggtccacctcctacaatgcacggctccaggccatgtggggccagagcctcctgccgcccgtgtccacctctttcaccacgggtgggctgcggatccccttccccagggactgcggggaggagatgcagaacggagccggtgcctccaggaccagcaccatcttcctcaacggcaaccgcgagcggcccctgaacgtgttttgcgacatggagactgatgggggcggctggctggtgttccagcgccgcatggatggacagacagacttctggagggactgggaggactatgcccatggttttgggaacatctctggagagttctggctgggcaatgaggccctgcacagcctgacacaggcaggtgactactccatccgcgtggacctgcgggctggggacgaggctgtgttcgcccagtacgactccttccacgtagactcggctgcggagtactaccgcctccacttggagggctaccacggcaccgcaggggactccatgagctaccacagcggcagtgtcttctctgcccgtgatcgggaccccaacagcttgctcatctcctgcgctgtctcctaccgaggggcctggtggtacaggaactgccactacgccaacctcaacgggctctacgggagcacagtggaccatcagggagtgagctggtaccactggaagggcttcgagttctcggtgcccttcacggaaatgaagctgagaccaagaaactttcgctccccagcggggggaggctgagctgctgcccacctctctcgcaccccagtatgactgccgagcactgaggggtcgccccgagagaagagccagggtccttcaccacccagccgctggaggaagccttctctgccagcgatctcgcagcactgtgtttacaggggggaggggaggggttcgtacaggagcaataaaggagaaactgaggtacccgaaaa

SEQ ID NO: 269 - DNA, 2279 bp, Homo sapiens
cctgggccggatgtcccgatgagagagccgcgctgacggccagcgccatggcttaccacccgttccacgcgccacggcccgccgacttccccatgtccgcctttctggcggcggcgcagccctccttcttcccggcactcgcgctgccgcccggcgcgctggccaagccgctgcccgacccgggcctggcgggggcggcggccgcggcggcggcggcggcagcagcggccgaggcggggctgcacgtctcggcactgggcccgcacccgcccgccgcgcatctgcgctccctcaagagcctggagcccgaggacgaggtggaggacgaccccaaggtgacgctggaggccaaggagctgtgggaccagttccacaagctaggcacggagatggtcatcaccaagtccgggaggcggatgttcccccccttcaaggtgcgagtcagcggcctggacaagaaggccaagtatatcctgctgatggacattgtagccgctgacgattgccgctataagttccacaactcgcgctggatggtggcgggcaaggccgaccctgagatgcccaaacgcatgtacatccacccagacagcccagccacgggggagcagtggatggctaagcctgtggccttccacaagctgaagctgaccaacaacatctctgacaagcacggcttcaccatcctaaactccatgcacaagtaccagccgcgattccacatagtgcgagccaacgacatcctgaagctgccttacagcaccttccgcacctacgtgttcccggagaccgacttcatcgccgtcactgcctaccagaatgacaagatcacacagctgaagatcgacaacaacccgtttgccaagggcttccgggacaccgggaacggccggcgggagaaaaggaagcagctgacgctgccgtctctacgcttgtacgaggagcactgcaaacccgagcgcgatggcgcggagtcagacgcctcgtcgtgcgaccctccccccgcgcgggaaccacccacctccccgggcgcagcgcccagtccgctgcgcctgcaccgggcccgagctgaggagaagtcgtgcgccgcggacagcgacccggagcctgagcggttgagcgaggagcgtgcgcgggcgccgctaggccgcagcccggctccagacagcgccagccccactcgcttgaccgaacccgagcgcgcccgggagcggcgttgtcccgagaggggcaaggagccggccgagagcggcggggacggcccgttcggcctgaggagcctggagaaggagcgccccgaagctcggaggaaggacgaggggcgcaaggaggcggccgagggcaaggagcagggcctggcgccgctggtggtgcagacagacagtgcgtcccccctgggcgccggacacctgcccggcctggccttttccagccacttgcacgggcagcagttctttgggccgctgggagccggccagccgctcttcctgcaccctggacagttcaccatgggccctggcgccttctccgccatgggcatgggtcacctactggcctcggtggcaggcggcggcaacggcggaggtggcgggcctgggaccgccgcggggctggacgcaggcgggctgggtcccgcggccagcgcagcaagcaccgccgcgcccttcccgttccacctctcccagcacatgctggcatctcagggaattccaatgcccactttcggaggcctcttcccctacccctacacctacatggcagcagcagccgcagccgcctcggctttgcccgccactagtgctgcagctgccgccgccgcagccgccggctccctctcccggagccccttcctgggcagtgcccggccccgactgcgtttcagcccctatcagatcccggtcaccatcccgcctagcactagcctcctcaccaccgggctggcctctgagggctccaaggccgctggtggaaacagccgggagcctagccccctgcccgagctggctctccgcaaagtaggggccccatcccgcggtgccctgtcgcccagtggctcggccaaggaggcggccaatgaactgctgagcatccagagactggtgagtgggctggagagccagcgagccctctccccaggccgggagtcgcccaagtgaggggctgcccagctgctcccctgccacgcaggccacccgggctgcctgcccctgctgcttgggacgtgtacagcacagaatgagtatttatttaaataaaggagaaaagtgggctgcagccgg

SEQ ID NO: 270 - DNA, 10716 bp, Homo sapiens
agggggcggcgctcccggccatcccttagccccgcggcggccgtgtgggccggaggctgcctgcaccgcgtcagggaggccggcctagaaaccctccctcccagaagaaagccgatcccagttcaggtggggtcttcctcggttgcgtacctggctggagccgagctggtgggcggccggcagccggcgtttctggtgatgacagccccgaaatgaaagcagcgcggccgccgcctccgagggctgcagggagatcagcgtccagcaaataagaagcaagtcctggacccggaggaggaggagcggccgagcatctctctctgctccgccgtgtcctttagatgagcactcccggccggagccggaggtggatccgcagagctgcctctgggcgcctgaccccgcgctgacatcacaacctgtgacaggcgcatcacgcccggtacctgctcccggccgctgtccgtcctcccagcctctttgtatgccgcagacatggccagccagcaggattcgggcttctttgagatcagtatcaaatatttactgaaatcctggagtaatacttctcccgttggcaacggttacatcaagcctccggttccacctgcttctggcacgcacagggagaaagggccgccaaccatgctacccatcaatgtggacccagacagtaaaccaggagaatatgtcctcaaaagtttatttgtcaacttcaccactcaggctgaacgcaagattcgtatcattatggcagagcccctggaaaagccattgacaaaatctctgcaacgtggagaagagccccaatttgatcaggtcatcagctcaatgagctccctttctgagtactgcctgccttccattctacgtacattatttgactggtataaaaggcaaaatggcattgaggatgaatcacatgaatacagaccaagaacaagcaataaatcaaaaagcgatgaacaacagcgagattatttaatggaaagacgggacctcgccattgattttattttttctttagtattaatagaagttttgaaacagattccacttcatcctgtaatagacagtttaatacatgatgttattaacttggctttcaagcactttaaatacaaagaagggtaccttggtcccaacactggcaatatgcatattgtggcagacctgtatgcagaagtcattggagtgttggcacaagccaaattccctgctgtaaagaagaaatttatggcggagctaaaagaattacggcacaaagagcagaacccatatgtggttcaaagcattatcagcttaataatgggcatgaaattctttcgaattaagatgtatccagtggaggattttgaggcctctcttcagtttatgcaggaatgtgcacattacttcctcgaggtcaaagacaaagatatcaagcatgccttggctgggctttttgttgaaatacttgttccagttgctgctgctgttaaaaatgaagtaaatgttccctgccttagaaattttgtggaaagcctgtatgacaccacgctggaactttcttctcgaaagaagcattccctggccttgttccccctggtgacctgtttgctctgtgtcagtcagaagcagctgttcctgaacaggtggcacattttcctcaacaactgcttgtccaaccttaaaaacaaagatcccaagatggctcgagttgcactggaatctctctacagattactttgggtttacatgattcgaattaaatgtgaaagcaacacagctactcagagccgacttataaccatcatcacaacacttttccccaaagggtcccgcggtgtggtaccaagggacatgcctctgaacatctttgtgaaaatcatccagttcattgcccaggaacgtttagattttgcaatgaaagaaatcattttcgattttctttgtgtgggaaaaccagcaaaagcattcagtctcaacccagagagaatgaacattggtttacgggcattcttggtcatagctgatagcttgcagcagaaagatggggaacctcccatgccggttacaggagccgttcttccttcaggaaacacgttaagagtaaagaaaacatatttgagtaaaacactaactgaagaggaagccaaaatgataggcatgtccttatattactctcaagtacgaaaagctgtagacaacattttaaggcaccttgataaagaagtaggaaggtgtatgatgctgactaatgtacagatgttaaacaaagaaccggaagacatgatcacgggtgagagaaagccaaaaatagatcttttcaggacctgtgttgctgctattcctcgactgcttcctgatgggatgtcaaaacttgaacttattgacttactggctaggctctctattcatatggatgatgaattgcgacatattgcacaaaattctcttcagggtttacttgttgacttctcagattggagggaagatgtactattcggctttaccaacttcctgctccgggaagtaaatgatgtgcatcacacactccttgattcgtccctgaagttgctgctgcagctgctcacccagtggaaactagtcatccagacacaaggaaaagtctatgaacaagccaacaaaatcagaaattcagagctcatcgcaaatggctccagccacagaattcagccggaacgaggtccccactgcagtgtactccacgctgtagaaggttttgctctggtttcactctgtagtttccaggtggccacacgcaaactgtccgtcttaatactcaaggaaattcgagcgttgtttattgccctggggcagcctgaggatgacgacaggccgatgattgatgtcatggatcagctaagttcttccattctagaaagttttattcatgtagcagtttcggattcagcaacattaccactcacccacaatgtggatctgcagtggttggtggaatggaacgcagtcctggtcaatagccattatgatgtgaaaagcccttcccatgtctggatatttgcacagtctgtcaaagacccctgggtcctctgcctcttcagcttcctccggcaggagaacttacccaagcactgtcccacagccctcagctatgcctggccttatgccttcactcggctccagtcggtgatgcctctggtggacccaaatagcccaattaatgccaagaaaaccagcactgccggcagcggagacaactatgttactttgtggagaaattacctaattctttgttttggagttgcaaaacccagtattatgagcccaggacacttaagagcttccactccagaaataatggcgaccacacctgatggtacagtgagctacgataacaaggccataggcaccccatcggtgggagttctgttaaagcagttggtgcctttgatgagactagagagcattgagatcacagagtccttagttttaggatttggaagaacaaattcccttgttttcagagaattggtagaagaacttcatccattaatgaaagaagctctggaaagaagaccagagaacaagaaacgccgagaacggcgagacttgttaaggctacaactacttcgaatttttgaacttttggctgatgctggtgtaataagtgacagcacaaatggagccctagagcgggatactttagccctgggagctttgttcttagaatatgtggacttgacccgcatgctcctagaagctgaaaatgacaaagaagttgaaattcttaaagatatccgggcacattttagtgcaatggtggccaacttgattcagtgtgttccagttcaccaccgaagatttctcttcccccagcaaagtctgaggcaccaccttttcatcttattcagccagtgggcaggacccttcagcattatgttcactcctctggatcgttacagtgacagaaatcatcagattacaagatatcagtattgtgcattagaagcaatgtcagcagtactgtgctgtggccctgtctttgacaatgtgggcctttccccagatggctacctatataaatggcttgacaacattctggcttgtcaagatttacgagttcatcaacttggctgcgaagttgttgtcttgctactggaacttaatcctgaccaaataaatctttttaactgggcaattgaccgatgctacacaggttcctaccaacttgcatctggctgcttcaaagccatagcaactgtgtgtggaagcaggaactatcccttcgacatagtgacattgttaaaccttgttctattcaagacctctgacaccaacagagagatttatgtaatctccatgcagctcatacagatccttgaagcacagctttttgtatactcagagaaagtctctgagcaaagaccgggaagtattctctatggaacacacgagccgctgccacccctctacagcgtgtcacttgccctcttgtcatgtgagctggccaggatgtaccctgagctcacactccccctcttctcagaggtaaaccagcgattcgccacaacacaccccaacgggcgccagatcatgcttacctacctgctgccctggctgcacaacatcgagctggtggacagcagactcctcctcccggggtcgagccccagcagcccagaggacgaagtcaaggaccgggaaggtgacgtgactgcttctcacgggctgagaggaaatggctggggctctccagaagccacgtcactggtcctgaacaacctcatgtacatgacggccaagtatggagatgaagttcctgggacagaaatggaaaatgcttggaatgctttagccaacaatgagaaatggagcaacaacctgaggatcaccttgcagttcctgattagcctctgtggggtcagcagcgacacagttctcctaccctatattaaaaaagtggcaatatacttgtgccgtaacaacaccattcaaaccatggaagagcttctctttgagctgcagcagacagagcccgtgaaccccatcgtccagcattgtgacaacccgcccttctaccgcttcacggccagtagcaaggcttccgcagcagcctcaggaaccacctctagcagcaatacagtggttgctggccaggaaaatttcccagatgctgaggagaacaagatattgaaagaatctgatgaaaggtttagtaatgtcatcagagcccacactcgcctcgagtcaagatacagcaatagctctggaggatcctacgatgaagataaaaatgatccaatttctccctacacgggctggttgctgactattacagagaccaagcagccgcagcccttaccgatgccttgtactggaggatgctgggcccccctggttgactatctcccggagaccatcactccccgggggccactccacaggtgcaatattgctgtaatttttatgactgaaatggtggtggatcacagtgtacgagaagactgggcgcttcatctaccattattacttcatgctgtcttcttaggtttagaccactaccggcctgaagtctttgaacacagcaaaaaactgcttcttcacctcttgattgccctctcttgcaacagcaatttccattccattgcttccgtgctcctgcagacccgagagatgggtgaagctaagactctaaccgtgcagccagcctaccaacctgaatatctctatacaggtggctttgacttcctgagagaggaccagtcatccccggtgcctgactcagggcttagttcaagctccacctcctctagcatcagtctgggaggcagcagtggaaacctcccacagatgacccaggaggtagaagatgtggacacagctgctgaaacagatgagaaggcaaacaagctcattgagtttctcacgaccagggcatttggtccactttggtgccatgaagacatcacacctaaaaatcaaaattcaaagagtgctgaacagctcactaattttctacgtcacgttgtatctgtatttaaagattccaaatcaggcttccatctggagcaccagttgagtgaagttgcattgcagacagccctcgcaagctcttcaaggcactatgctggtcggtccttccagatattccgggccctcaagcaacctctgtcagcacatgccttatctgaccttctctcaagattggtggaggtgataggagaacatggagatgagattcagggttatgtaatggaagcgctcctaaccttggaggcggctgtggataacttgtctgactgcttgaagaacagtgacctcctaactgtattgtcccgctcttcctcaccagatttaagctccagcagtaaactaacagcaagcagaaagagcacaggacaactaaacatgaacccgggaaccaccagcggcaacaccgcaactgccgaacggagccggcatcaacgaagcttctctgtgcccaagaagtttggtgtcatcgaccgatcctctgacccacctcgaagtgccacactggacagaattcaggcttgtacccaacaaggcctctcctcaaaaaccagaagctcatcctccttgaaggacagtctcacggacccatcccacataaaccatcccaccaacctgctggccaccatattctgggtcacagtggccttgatggagtctgattttgagtttgaatacttaatggccttaaggctgttgagcagactactggcacatatgccactcgataaggctgagaaccgagaaaagcttgagaaactccaggcacagctgaagtgggccgacttctccgggctgcagcagctgctgctgaaaggattcacatccctcaccaccacagacctgaccctgcagctcttcagtctgctgacaccagtgtccaaaatatccatggtggatgcatcccacgctattgggtttccactgaatgtcttgtgtctcctgcctcagctgattcagcattttgaaaatcccaatcagttctgtaaggatatagccgaaaggattgctcaggtttgtttagaagagaagaaccccaaactttcaaatcttgcacatgtcatgactctttataaaacgcacagctacacgagggactgtgccacgtgggtcaatgtggtctgtcgataccttcatgaagcatatgctgacattaccttgaatatggttacctacctggcagagctgctggagaagggcctccctagtgtgcagcagcccctgctccaggtgatctacagtcttctcagctacatggacctttctgtcgttcctgtcaaccagttcaatgtggaagttctgaagacaattgaaaaatatgtgcaaagtgttcactggagagaagctctgaatatcttgaagctggtagtttctcggtcagccagccttgttttaccttcataccagcacagtgacctctcaaaaatagaaatacatcgagtgtggactagtgcttccaaggaattacctgggaaaaccctggacttccacttcgatatttcggagactccaatcatcgggaggcggtatgatgagctgcagaattcttctgggcgtgatgggaagcccagggccatggccgtcacccggagcacatcttccacttcctcaggctccaactccaacgtccttgttccagtgagctggaaaaggccccagtattctcagaagagaacaaaagagaagttggtacatgtcctttctctgtgtggccaagaagtaggattgaccaaaaatccatcagtgattttttcatcgtgtggggatctggatctgcttgagcaccagacaagcttggtatcttctgaggacggtgcccgagagcaggagaacatggatgacacaaacagcgagcagcagtttagagtcttcagagacttcgacttcctagatgtggagctggaggatggagaggaacttcagggtgagagtatggacaatttcaactggggagtgcgcagacgttctctggacagcctggataagtgtgatatgcagattctggaggagcgccaactgtcaggaagcactcctagcctgaataaaatgcaccatgaggactccgatgaatcatccgaggaggaggacctcacagccagccagatcctggagcactcagacctaatcatgactctctccccctctgaagagacgaatcccatggagctgctcaccacagcctgtgactcgacccctgcagaacctcattcctttaacaccagaatgtccagctttgatgcttccttgcctgatatgaataatctgcagatttctgagggttcaaaggctgaagctgttcgtgaggaggaggacaccaccgtgcatgaggatgatctttctagttccatcaatgaactcccagcagcttttgaatgcagcgacagctttagcctggacatgactgagggggaagaaaaaggcaatcgggcactggaccagtttaccctggcgagctttggagaaggtgacaggggagtctctccccctccctcgcccttcttctcagccatccttgccgcctttcagcccgcagcctgtgacgatgccgaggaggcctggcgcagccacatcaaccagcttatgtgtgactcagatggctcctgtgctgtgtatacatttcatgtgttctcctccttgtttaagaatattcagaaaaggttctgcttcctaacctgtgatgcagccagttaccttggagataacctccggggaatcggatccaaatttgtcagctcttcccagatgctcacctcctgctctgaatgtcctacactttttgtggatgccgagactctcctttcatgtggacttctggacaagctcaagttcagtgtgttagaactgcaagaatatttggatacctacaacaacaggaaagaggccacactctcttggcttgcaaattgtaaggcaacatttgcagggggatcaagagatggagtaattacctgtcaaccaggggactccgaagaaaagcaattggaactgtgtcagagattatataagctacacttccagctgctattgctttttcagtcctactgtaagctcatcggccaggtgcacgaagttagctccatgccagagctgctgaatatgtccagggaactgagtgacctaaagaaacacctgaaggaagccagtgcagtcattgcagctgaccctctctattcagacggcgcgtggtccgagcccaccttcacgtccactgaagcagccatccagtccatgctggagtgcctgaagaacaacgaactcggcaaagctttgcggcagatcagggagtgcagaagtctgtggcccaatgacatctttggaagcagttctgatgatgaggtccagacactactgaatatttatttccgtcaccaaactctgggacagacgggtacttatgccctggtggggtctaaccagagcctgaccgagatctgcaccaagctgatggagctgaacatggagatccgggacatgatccgcagggcccagagttaccgagtcctcactacttttcttccagactccagtgtttctggcactagtctctgacaggagcctcctgtccccactgggttccaaactggcagtgctgccatgctggggcaacgtcattcagtgtcttctcggccttcaaaaggcttggacagactgttctccctcttgttacctgtagggctttttctaaagaggatggcagaacttccaacgtgtagcaatactataagaaccaaggtagcttagaacgtcctggacagactccactcatcatgctgtgtggcacaaatgtgttacatttgaccgagcatatgcaactcgctactgaagaagtgacttccgttgcataccaaagccgactacactgaacagtaccttcctttctagaaacaattttagattggcaaaagtgcaatgttttcttcactcaaaaaattttatattctcaaacatgtatattctttccctgtcttgttccattttcttttcttttttcttttttctttttcctttctttcgtgggctgagaaaggggcaggcaaaatgaagctggccactgaaaactgtaagatggtcaaaagctgacagcctgtgtatgtgaaaagggaattgtaaatggactgcaatgtaatgtacactgtaatttgaatacaattactgtatctaaaaggagctgctatgaagtacctttcttatgttgctaggctactgtttctgaaagccctggatctctttgcaccaaaaatggtccagatagactctttttaaggatcttggctgctttttactagaaggttgcttttatgagcatatttatactgctgaaggatgagtgttaattttaattaactttgccgttttgtagagaaaactattcacaagataaattccaagtcttttcacctgtcaggcatgcatattttaatatctgtttggatagtcagaagtagaatcataaaggtaaaatatgagttgttactttgtttcttcgatgtcatattttatgtgtaatatatatgtaaagggccattcttaagttctctccttaaacttaatgctgtcaagtgttagatgtgtgcatgtgaacttgttgcactgcagaaacatattcagagtttatctatgtaacttattcactctgtaaatacatttaaagtttttgtgatgtaagcttaattgatattctgttcagaactttctttagrcgaagaaaaaaaaaaaaaa

SEQ ID NO: 271 - DNA, 1023 bp, Homo sapiens
tcttgaagccagagcagcgccaggatgtcacgggagctggccccactgctgcttctcctcctctccatccacagcgccctggccatgaggatctgctccttcaacgtcaggtcctttggggaaagcaagcaggaagacaagaatgccatggatgtcattgtgaaggtcatcaaacgctgtgacatcatactcgtgatggaaatcaaggacagcaacaacaggatctgccccatactgatggagaagctgaacagaaattcaaggagaggcataacgtacaactatgtgattagctctcggcttggaagaaacacatataaagaacaatatgcctttctctacaaggaaaagctggtgtctgtgaagaggagttatcactaccatgactatcaggatggagacgcagatgtgttttccagggagccctttgtggtctggttccaatctccccacactgctgtcaaagacttcgtgattatccccctgcacaccaccccagagacatccgttaaggagatcgatgagttggttgaggtctacacggacgtgaaacaccgctggaaggcggagaatttcattttcatgggtgacttcaatgccggctgcagctacgtccccaagaaggcctggaagaacatccgcttgaggactgaccccaggtttgtttggctgatcggggaccaagaggacaccacggtgaagaagagcaccaactgtgcatatgacaggattgtgcttagaggacaagaaatcgtcagttctgttgttcccaagtcaaacagtgtttttgacttccagaaagcttacaagctgactgaagaggaggccctggatgtcagcgaccactttccagttgaatttaaactacagtcttcaagggccttcaccaacagcaaaaaatctgtcactctaaggaagaaaacaaagagcaaacgctcctagacccaagggtctcatcttattaaccatttcttgcctctaaataaaatgtctctaacagaaaaaaaaaaaaaaaaaaaaaaa

SEQ ID NO: 272 - DNA, 2784 bp, Homo sapiens
accaaaccgtcctctacagcctcctggccccggcgcaggctgcccgtactgcccgtggcatgagggagccggaagagctgatgcccgattcgggtgctgtgtttacatttgggaaaagtaaatttgctgaaaataatcccggtaaattctggtttaaaaatgatgtccctgtacatctttcatgtggagatgaacattctgctgttgttaccggaaataataaactttacatgtttggcagtaacaactggggtcagttaggattaggatcaaagtcagccatcagcaagccaacatgtgtcaaagctctaaaacctgaaaaagtgaaattagctgcctgtggaaggaaccacaccctggtgtcaacagaaggaggcaatgtatatgcaactggtggaaataatgaaggacagttggggcttggtgacaccgaagaaagaaacacttttcatgtaattagcttttttacatccgagcataagattaagcagctgtctgctggatctaatacttcagctgccctaactgaggatggaagactttttatgtggggtgacaattccgaagggcaaattggtttaaaaaatgtaagtaatgtctgtgtccctcagcaagtgaccattgggaaacctgtctcctggatctcttgtggatattaccattcagcttttgtaacaacagatggtgagctatatgtgtttggagaacctgagaatgggaagttaggtcttcccaatcagctcctgggcaatcacagaacaccccagctggtgtctgaaattccggagaaggtgatccaagtagcctgtggtggagagcatactgtggttctcacggagaatgctgtgtatacctttgggctgggacaatttggtcagctgggtcttggcacttttctttttgaaacttcagaacccaaagtcattgagaatattagggatcaaacaataagttatatttcttgtggagaaaatcacacagctttgataacagatatcggccttatgtatacttttggagatggtcgccacggaaaattaggacttggactggagaattttaccaatcacttcattcctactttgtgctctaattttttgaggtttatagttaaattggttgcttgtggtggatgtcacatggtagtttttgctgctcctcatcgtggtgtggcaaaagaaattgaattcgatgaaataaatgatacttgcttatctgtggcgacttttctgccgtatagcagtttaacctcaggaaatgtactgcagaggactctatcagcacgtatgcggcgaagagagagggagaggtctccagattctttttcaatgaggagaacactacctccaatagaagggactcttggcctttctgcttgttttctccccaattcagtctttccacgatgttctgagagaaacctccaagagagtgtcttatctgaacaggacctcatgcagccagaggaaccagattatttgctagatgaaatgaccaaagaagcagagatagataattcttcaactgtagaaagccttggagaaactactgatatcttaaacatgacacacatcatgagcctgaattccaatgaaaagtcattaaaattatcaccagttcagaaacaaaagaaacaacaaacaattggggaactgacgcaggatacagctcttactgaaaacgatgatagtgatgaatatgaagaaatgtcagaaatgaaagaagggaaagcatgtaaacaacatgtgtcacaagggattttcatgacgcagccagctacgactatcgaagcattttcagatgaggaagtagagatcccagaggagaaggaaggagcagaggattcaaaaggaaatggaatagaggagcaagaggtagaagcaaatgaggaaaatgtgaaggtgcatggaggaagaaaggagaaaacagagatcctatcagatgaccttacagacaaagcagaggatcatgaattttctaaaactgaggaactaaaactagaagatgtggatgaggaaattaatgctgaaaatgtggaaagcaagaagaaaactgtgggagatgatgaaagtgttcctacaggttatcacagtaaaacagaaggagcagaaagaaccaatgatgatagctcagctgaaactattgaaaagaaagaaaaagccaacctagaggaacgggccatttgtgagtacaatgaaaacccaaaaggatacatgcttgatgatgcagatagcagttcattagaaatcctagaaaacagtgaaacaacaccaagcaaagacatgaaaaaaacaaagaagatttttctgttcaaaagagtcccctcaataaatcaaaagattgtcaagaataacaatgagccgctcccagagataaaatccataggagaccagatcattttaaaaagtgataataaagatgccgaccagaaccacatgagtcagaatcatcagaatatcccaccaacaaatacagagagaagatcaaaatcctgtacaatactataaatatatatttatgttttcacagtcaccaagtgtattgtaatgtatacttgaaaaatgttataacttatgaagtaaagtttctgatagtagtctttaaaagatataagacttaatatgttttattcagcttctataagtgtgaccagttttgatatttatttatgctaatatttttaacaagtcatttcaaaatatgtgtatctcaaattctccctaaagtgttgtggccttaactgttcagtattgcaataaaaaatatatttttatatgtggaaaa

SEQ ID NO: 273 - DNA, 170 bp, Homo sapiens
ctcctctcaggttttattgactgatgggaaactacatctttgtcagccaccagctccatggggacagtgctgggggacagggaacctgagatgatgccagatttcagcctgagagcagagttttggaaggtcacccaagagggagaagaaaggaatatgtgaaaaaggaa

SEQ ID NO: 274 - DNA, 341 bp, Homo sapiens
ttttttttttaccccagagtatttttattagggattcctgccaccatattaacatataaaacaatctggatgttgacatagaaatgcaaatttcactatacaaaggtaaggctccaatcacagtaacatggcccccatatctctagtatttcaatgaaataaactcattgtgaattcaccccgagttgtgtttataaatattagacaaaccacaaaatatattccaaatacataacattttacaatatttttcaagcacagacaaatacatactttactttacctacattgttttcatgatccaacttgcattagcactaaaggcaatattgtgtgtgtat

SEQ ID NO: 275 - DNA, 302 bp, Homo sapiens
cattttttaacaagcaaattttaataatgccttttatttctatacaaagcaatgtaactttctgaaaaaaaaaatggctatacagaaccctttaaacataagagtacagagtttcaaatggcaacaagaagttaagaaacatagggcactgtgtcgttatgggtgaatcctagtcgtcctgcagcccaaggtccaagctagtttactccataaccttaagtaaataaccgcggttcctatgaatacctttccaaaaccatttattataaaaactcactctttatccattatcagtattaacg

SEQ ID NO: 276 - DNA, 406 bp, Homo sapiens
caatttagtcactatttattatattgacatatttacaaaataatacaaagtgaaataccactctaattcaccatattacacaagggctgcatacaggcaagacaaagtatatggaaaacatttacttctgtctttggtattagaactctacacaaatctgcagcatttaaattttccaaaacaaagtattaaacgtggacaaagatgtaattggtaatgtcacaaaaaggggctccaatatcctctgctaggaaacccccaggcccatgaaatgcaacaggaagactaaacaccatttataaggagagggtctattgactaaaataaacaatacatgctacaataccatccacaggagtgtttctgcttgtgtgaggctgctccctccataacaaagttcggctga

SEQ ID NO: 277 - DNA, 384 bp, Homo sapiens
atcataaaacatctttttaatgtgaacactacttcatacaatgaaaaactatttacaatgtattgtttccagattggctgcttttacatcatctctacccatgtgctgactcggcatgtatcttcagccagggagcttcagtccaattgcacattctcctcgatcggctctccaaggaccccggggattcagggaacccgtccacttacattctctttagtaattatggctcagcaagcatgccaccaaaatcatctagaacccagagactctggcaaccccatataagtaaaaatgtgtagatcaggtttttttctccaataaataataatttgacaatccaatccatttccatcttaagaaattgttttcacttaggaaaat

SEQ ID NO: 278 - DNA, 212 bp, Homo sapiens
  misc_feature: n=a,t,g or c
tccttttaatatgaggaggtctggtgtgaagacagatcaagcatgggtacctggcttgaacattgtccattaagaaaatgtatcagtctccgcatagcatcagtcaagggtcaaggaaaatgcccctgacttgcntgtgttctcagagtgtcttcgcagcacagtttntgaaattcaaatagtngttttgagacaaaaatnccgccaggtac

SEQ ID NO: 279 - DNA, 189 bp, Homo sapiens
aagaaaaataactttgttattaatcatatacaatcataacaaaagtacatcatagtatcacatccataattgcttgaatgctaacttgactgttacatggacctgttacaaataatgaacaacagagctactccagtatatgactagtcactgtgaaataaaaacagacccatggcacacatggaaatt

SEQ ID NO: 280 - DNA, 186 bp, Homo sapiens
gctggtcagaaagccatttaatccataaacacaaagacacatgaatgggcaaattctgtaaatgaaagcaatctggcaaaagcccttggtggtgagcttggtctccctcacaggcaatgacagtcttggccatgggtctagacaacacacaattccaatgcagcctaggaggacattatggaagtg

SEQ ID NO: 281 - DNA, 454 bp, Homo sapiens
  misc_feature: n=a,t,g or c
taaaacagcatacatttattatctgaaagtttctgtgggtcaggagtccaaacgtgatttagctgggtcctctgctcagagtttcacaaagctgcaagcaaggcgttggctggggctgggcttttatctgaggttcagatgcttcttccaagatcacatggttgttcacaaaacttatttccttgcagccgtagagctcatggcagcttgcttatttaaggctaataggagagagagtctctgactggttcactctcttttaaaggactagtctgattaggtcaggcccacccaggggatctctttgattaactcaaagtcagctgattagaaaccttatgtatatctgcaacttctcttcacttttgttatataacataacataatatggggagagatgatcccatcactttttggccataatcnggttgggttaagaagcaggttacatggt

SEQ ID NO: 282 - DNA, 430 bp, Homo sapiens
  misc_feature: n=a,t,g or c
gcagagtagtgttagaatagatggcctacagaaaaaaaaggttctgggatctacatggcagggagggctgcactgacattgatgcctgggggaccttttgcctcgagnctgagctggaaaatcttgaaaatattttttttttcctgtggcacattcaggttgaatacaagaactatttttgtgactagtttttgatgacctaagggaactgaccattgtaatttttgtaccagtgaaccaggagatttagtgcttttatattcatttccttgcatttaagaaaatatgaaagcttaaggaattatgtgagcttaaaactagtcaagcagtttagaaccaaaggcctatattaataaccgcaactatgctgaaaagtacaaagtagtacagtatattgttatgtacatatcattgttaatacagtcctggg

SEQ ID NO: 283 - DNA, 413 bp, Homo sapiens
  misc_feature: n=a,t,g or c
ttactaccagcgtgaacaaccagcatttttattgcatttgagaatgcttataatgtcagtaattagtactgactacacaacatttttttattgtctgtatccgcagacatggaatgatggaattacagttgatgtcaaggaatgagtttcttttatgccttatcaaaacaaaacaaaacaaaacaaaaaaattcttgttactggcagcacatatacatgaagcaccatgctcacagtccggactgtatcatcttcatcaaggcttatgggtagcagagattgcgtgantaacactgggcccaagaaaatgccttcagcattgtaaaatctggattttcagggataaagaagcaaaactggactttgaagacatccagaatttcaggagggnatggtcattaaccaaaaggtag

SEQ ID NO: 284 - DNA, 282 bp, Homo sapiens
  misc_feature: n=a,t,g or c
tatcatttttaatngctttattcattgattaaaagaatatacatttaacataaaccatacaacatcagtcatcaggtcaaacattcagctggtttccttacagtttctgtcaggagttattttatctgatcacatttataagataaaatctcaccacatctggcatttacacacactgtgccagtggattcacactactgatgtacatataaaatccgcatggtatgtgctcactggagacaaaacagtgcacacctgtcaaaaggtcattttaactaataa

SEQ ID NO: 285 - DNA, 874 bp, Homo sapiens
gggcgggaagacgtgcagcctgggccgtggctgctcactgcgttcggacccagacccgctgcaggcagcagcagcccccgcccgcgcacgagcatggagctctggggggcctacctcctcctctgcctcttctccctcctgacccaggtcaccaccgagccaccaacccagaagcccaagaagattgtaaatgccaagaaagatgttgtgaacacaaagatgtttgaggagctcaagagccgtctggacaccctggcccaggaggtggccctgctgaaggagcagcaggccctgcagacggtctgcctgaaggggaccaaggtgcacatgaaatgctttctggccttcacccagacgaagaccttccacgaggccagcgaggactgcatctcgcgcgggggcaccctgagcacccctcagactggctcggagaacgacgccctgtatgagtacctgcgccagagcgtgggcaacgaggccgagatctggctgggcctcaacgacatggcggccgagggcacctgggtggacatgaccggcgcccgcatcgcctacaagaactgggagactgagatcaccgcgcaacccgatggcggcaagaccgagaactgcgcggtcctgtcaggcgcggccaacggcaagtggttcgacaagcgctgccgcgatcagctgccctacatctgccagttcgggatcgtgtagccggcggggcgggggccgtggggggcctggaggagggcaggagccgcgggaggccgggaggagggtggggaccttgcagcccccatcctctccgtgcgcttggagcctctttttgcaaataaagttggtgcacgttcgcggagaggaaaaaaaaaaaaaaaaaaaaaaaaaa

SEQ ID NO: 286 - DNA, 2834 bp, Homo sapiens
tcggagcctgcggagggtggtggtggtggtggtggtggccctcgcccgcctcactcatgcctcctcctcctctgctctcgctcaggcgcctcggtggcggttggtcggcggttacgcggctggtggtcgcggcggccggggctcgctctcggggaggccggggcggatctcgcggcgcaggcggcggcggccgaggtggggtcgcgcggcggaggcggctcgagcttcgtgctgcgcgctcgctcttgggctcctcgctgcaggaggagtgtgactatgtgcagatgatcgaggtgcagcacaagcagtgcctggaggaggcccagctggagaatgagacaataggctgcagcaagatgtgggacaacctcacctgctggccagccacccctcggggccaggtagttgtcttggcctgtcccctcatcttcaagctcttctcctccattcaaggccgcaatgtaagccgcagctgcaccgacgaaggctggacgcacctggagcctggcccgtaccccattgcctgtggtttggatgacaaggcagcgagtttggatgagcagcagaccatgttctacggttctgtgaagaccggctacaccattggctacggcctgtccctcgccacccttctggtcgccacagctatcctgagcctgttcaggaagctccactgcacgcggaactacatccacatgcacctcttcatatccttcatcctgagggctgccgctgtcttcatcaaagacttggccctcttcgacagcggggagtcggaccagtgctccgagggctcggtgggctgtaaggcagccatggtctttttccaatattgtgtcatggctaacttcttctggctgctggtggagggcctctacctgtacaccctgcttgccgtctccttcttctctgagcggaagtacttctgggggtacatactcatcggctggggggtacccagcacattcaccatggtgtggaccatcgccaggatccattttgaggattatggtctgctcaggtgctgggacaccatcaactcctcactgtggtggatcataaagggccccatcctcacctccatcttggtaaacttcatcctgtttatttgcatcatccgaatcctgcttcagaaactgcggcccccagatatcaggaagagtgacagcagtccatactcaaggctagccaggtccacactcctgctgatccccctgtttggagtacactacatcatgttcgccttctttccggacaattttaagcctgaagtgaagatggtctttgagctcgtcgtggggtctttccagggttttgtggtggctatcctctactgcttcctcaatggtgaggtgcaggcggagctgaggcggaagtggcggcgctggcacctgcagggcgtcctgggctggaaccccaaataccggcacccgtcgggaggcagcaacggcgccacgtgcagcacgcaggtttccatgctgacccgcgtcagcccaggtgcccgccgctcctccagcttccaagccgaagtctccctggtctgaccaccaggatcccagcccaagcggcccctcccgccccttcccactcgcagcagacgccggggacagaggcctgcccgggcgcgccagccccggccctgggctcggaggctgcccccggccccctggtctctggtccggacactcctagagaacgcagccctagagcctgcctggagcgtttctagcaagtgagagagatgggagctcctctcctggaggatgcaggtggaactcagtcattagactcctcctccaaaggccccctacgccaatcaagggcaaaaagtctacatactttcatcctgactctgccccctgctggctcttctgcccaattggaggaaagcaaccggtggatcctcaaacaacactggtgtgacctgagggcagaaaggttctgcccgggaaggtcaccagcaccaacaccacggtagtgcctgaaatttcaccattgctgtcaagttcctttgggttaagcattaccactcaggcatttgactgaagatgcagctcactaccctattctctctttacgcttagttatcagctttttaaagtgggttattctggagtttttgtttggagagcacacctatcttagtggttccccaccgaagtggactggcccctgggtcagtctggtgggaggacggtgcaacccaaggactgagggactctgaagcctctgggaaatgagaaggcagccaccagcgaatgctaggtctcggactaagcctacctgctctccaagtctcagtggcttcatctgtcaagtgggactctgtcacaccagccattcttatctctctgtgctgtggaagcaacaggaatcaagagactgccctccttgtccacccacctatgtgccaactgttgtaactaggctcagagatgtgcacccatgggctctgacagaaagcagatcctcaccctgctacacatacaggatttgaactcagatctgtctgataggaatgtgaaagcacggactcttactgctaacttttgtgtatcgtaaccagccagatcctcttggttatttgtttaccacttgtattattaatgccattatccctgaattccccttgccaccccaccctccctggagtgtggctgaggaggcctccatctcatgtatcatctggataggagcctgctggtcacagcctcctctgtctgcccttcaccccagtggccactcagcttcctacccacacctctgccagaagatcccctcaggactgcaacaggcttgtgcaacaataaatgttggcttggaaaaaaaaaaaa

SEQ ID NO: 287 - DNA, 1523 bp, Homo sapiens
gtgccgattcctgccctgccccgaccgccagcgcgaccatgtcccatcactgggggtacggcaaacacaacggacctgagcactggcataaggacttccccattgccaagggagagcgccagtcccctgttgacatcgacactcatacagccaagtatgacccttccctgaagcccctgtctgtttcctatgatcaagcaacttccctgaggatcctcaacaatggtcatgctttcaacgtggagtttgatgactctcaggacaaagcagtgctcaagggaggacccctggatggcacttacagattgattcagtttcactttcactggggttcacttgatggacaaggttcagagcatactgtggataaaaagaaatatgctgcagaacttcacttggttcactggaacaccaaatatggggattttgggaaagctgtgcagcaacctgatggactggccgttctaggtatttttttgaaggttggcagcgctaaaccgggccttcagaaagttgttgatgtgctggattccattaaaacaaagggcaagagtgctgacttcactaacttcgatcctcgtggcctccttcctgaatccctggattactggacctacccaggctcactgaccacccctcctcttctggaatgtgtgacctggattgtgctcaaggaacccatcagcgtcagcagcgagcaggtgttgaaattccgtaaacttaacttcaatggggagggtgaacccgaagaactgatggtggacaactggcgcccagctcagccactgaagaacaggcaaatcaaagcttccttcaaataagatggtcccatagtctgtatccaaataatgaatcttcgggtgtttccctttagctaagcacagatctaccttggtgatttggaccctggttgctttgtgtctagttttctagacccttcatctcttacttgatagacttactaataaaatgtgaagactagaccaattgtcatgcttgacacaactgctgtggctggttggtgctttgtttatggtagtagtttttctgtaacacagaatataggataagaaataagaataaagtaccttgactttgttcacagcatgtaggtgatgagcactcacaattgttgactaaaatgctgcttttaaaacataggaaagtagaatggttgagtgcaaatccatagcacaagataaattgagctagttaaggcaaatcaggtaaaatagtcatgattctatgtaatgtaaaccagaaaaaataaatgttcatgatttcaagatgttatattaaagaaaaactttaaaaattattatatatttatagcaaagttatcttaaatatgaattctgttgtaatttaatgacttttgaattacagagatataaatgaagtattatctgtaaaaattgttataattagagttgtgatacagagtatatttccattcagacaatatatcataacttaataaatattgtattttagatatattctctaataaaattcagaattct

SEQ ID NO: 288 - DNA, 247 bp, Homo sapiens
  misc_feature: n=a,t,g or c
ggtgatgcagatttcaacagtaactctggaaaactgtgaaaaatgttatttaaaaatatatatgtatatgctactgacagtttcaaagatgtgattcataaataatgttggctgcactgattaattttataacaattactgcacttccaagttgatgcgaacacgcagnacntcatactcaatattaggcactagtaatatccttcaggcgtactacagttttatgttagctgtattgtacatatat

SEQ ID NO: 289 - DNA, 365 bp, Homo sapiens
  misc_feature: n=a,t,g or c
gttcatttttggagtaggtttccttggtggtttttaggacatatttgttggtaaacctataacagttgcttttactttcagtgatgtactttttncttttcctgcttcccagagatttatcagaggaggataaagctcacctaatgcaaaggttggtttctgtaagtaattcctcacatagctgtgtccaccatcacagttcatttctggagagaggcagctgataagacatatcacaccaataatccccagaaggcctccaagacaggccataagtgttgtggtattattcttttcatactctttttgatcagggtgcaaacctttggtggtgacatttacacatttttttctgtttttctgat

SEQ ID NO: 290 - DNA, 332 bp, Homo sapiens
acatttaagtgttccatttatttttaaatgcatcagaaaagcaattatgatagatctgtgaccaatacaaacatttctgatttattcaaaaaattcagttaaaaaagtcattaaactagcattctgtaaagataattattaaacaaatggtaatgcatttttactccttatttcatttctaacatacccaatgtcacttctttcttgtgccatacagtaataaaatgtaacagaaatagatatctattaaattttgggggcctaataaaatatttttgattattcaactgtcattaaatcacaaatcccactcaagtaatgaaaatcattct

SEQ ID NO: 291 - DNA, 1305 bp, Homo sapiens
  misc_feature: n=a,t,g or c
ngcggcagcagcagcagcaacagcaactgcgaaacctgcgtgacttcctgttggtctacaatcggatgacagaactctgcttccagcgctgtgtgcccagcttgcaccaccgagctctggacgctgaggaggaggcctgtctgcacagctgtgctgggaagctgatccattccaaccaccgcctcatggccgcttacgtgcagntcatgcctgccctggtacagcgccgcatcgcagactacgaggntgcctcggctgtgccaggcgttgntgctgaacagcctggggtctctccatcaggcagctagccatacccaaccccaggaaggaaggccttggatggaccctcaagattgaaggacccggtnggaccttggggttggtgaatcctaaacagagagaattcgaggttgcctgaaagctgggttgtccttgctccttttcctggagncaatatacccagtttttactcagtggtgatttatattctgntnaaggaagcttggcctactttattggaacaatccggggtnctgtcgtttagtgaatatctgctggntncagccctggnagntgagaaattgtnttctatntgtngaaggaaaccctgagtatgggnaggcatctggttaaagnagggtctgtgtgtacaattttaaaacgggtaatatgtcatgctcttagcncatctccacaancaaactatgagtaagcggtattagcctcacttaacagatgaggaagcaagcttccagaaagtaccagaaggtcattttatacaacaggagattggttcctgcccagatgacagaaaatgggagctctgtctagttgtccttaagtctgactgacttcagtggctcataaccgtgagccaagtatttgttggntcataactgttgttttgtgaactatgtcttacatgtctagagttctgctggatctagggaaaggaggagntatcgaagtacaacggatcaaaaaaccacagggcttttggggcactgcctccttgggaagttagtggccacagaagagagatgaaacctgtaagaagtcttggagtcttttgggaacttcagccatttccccaggttgttactttcttagtatgtacagtcttctcaggatgagcagtaaaacctttgaacaaaggtctgtgtggttgtcttcacgggcaatcaggaagggagagagctggggaccatattctgcaatgcagccaantccgaggaagagaaactgaagggagaagtagatggcaatggntatgataaaaagggataaaactaaatcttcgggact

SEQ ID NO: 292 - DNA, 43058 bp, Homo sapiens
gatcacgccattgcactccaccctgggcgacagagcgacgagaccccgtatcaaaaaaaaaaaaaagaaagaaagaaagaaaaaagaaaaaaaaaaggccgggcgcggtggctcacgcctgtaatcccagcactttgggaggccgaggcgggtgaatcacgaggtcaggagttcgagaccatcctggccaacatggtgaaaccccgtctctacaaaaaaaaaaaaaaaaattagccgggcgtggtggcgggcgcctgtaatcccagctactcgggaggctgagacaggaaaatcgcttgaacccgggaggcggagcttgcggtgagccgagattgcgccactgcactacagcctaggcgacagagcgagactccgtctcaaaaaaaaaaaaaaaaaaaaaaaacacttggaagccgacaggagatctttgagaccttgggcgaggcagtgacactaaaggcaggagcgactacagaagaataaattaaacttcatcagattaaaaactttactgcggccgggcgcggtggctcacgcctgaaatcccagcactttgggaggccgaggtgggcagatcatgagatcaggagatctagaccatcctggccaacatggtaaaaccccgtctctctactaaaaatacaaaaattagctgggtttggcggcgcctgcttctaatcccagctactcgggaggctgaggcaggagaatcgcttgaagccgggaggcggaggttgcagtgagccgagatcgtgccactgaactctggcctggcgacagagcgagactccatctcaaaacaaaacaaaaacttcggtgctttaaaggacaccatcaagaaaattaaaagtccacccacagaacgggagaaaatatttgtaagttacatatctgataagggaattgtatctagaatggaggaaacttacaactcaacaataaaaagacaattgaaaaatgcacaaaggatatgaatatttttccagtgcattatgcaaatggccaataagcaccagaagatgctcagctcaactggtagaggcttacgcctgtgaccccagcgctgagaggccaggaactccagaccagcctgggcaaaacagaaattaaaaatgctcaacattattaggcattagggagatgcaaatcaaaactacaaatagatgccacatcacacctcctacgatggctgtaatcaaaaagacaagcgtcagcaggggtgtggagaaacgggaatctctctcctgctggtgggaatgtaagaggctacactcgctatggaaaacaggctggcagttcctgaaaggttagagttaacacaacactcggcaaatcccccttttagatatatagccaagagaaatgaaagcatatgtccacacaaaaacatgtgtgttcttagtaatattattcataatagcccaaagtggaagcaatcctagggtatatcaattgatgaatgggtgaatatggtatagtttgtttaagggaatactattcagccataaaaaggaatgaagtacggcacatgaatccatcttgaagacacactaatatatgattccatttatataagatgcccagaataggcaaatccatagagacagaatgattagtggctgcctagggcttccagggggtcaggggaaatatggagcgattcatgggttttttgaaggggagtgatgaaaatgttctaacgttgactgtggtaatggttggacagctctgagaacgcgaatacactaaaagacatggaagtgccgggcgcagtggctcatgcctgtaatcccagcgctttgggaggccaaggcaggcggatcgcgaggtcaggagatcgagaccatcctggctaagacagtgaaaccccgtgtctactaaaaatacaaaaaattagctggacatggtgcgggcgcctgtagtcccagatactcaggaggctgaggcaggagaatggtgtgaacccgggaggcggagcttgcagtgagccaagatcgcaccattgcactccagcctgggcgacagagcgagactccatctcaaaaacaaaaaaaagatatggaagtgtacacttgaagtggataagctttatggtatgcaaattggtatggtatggtaaattatatctcaatgaagttgttttttaaaaaatcaccccacctaccctatcccaggcttccccaggaggtaactaaaggtaatgagcttctttggctgcttccagaactttcccaagcacatcaaatgcatcagaacctaaccacttgactgagggatgagcattttcactgttgcaagtaaccctcttgcaccaacactgacactaatgtgtattttgcagaacaaatttgtggattggcctcaccagggtgaagggtacgtgcatttgaaatggctcaacagtaccaacaggtgcgttttcttgcacagggctgcataacattttttttttttttttgagacagagtctcgctctatcacccaggctggagggcagtggcacaatctcagttcactgcaagctccacctaccaggttcacatcattctcctgcctcagcctcccaagtagctgggactacaggtgcccgccaccacaccaggctaattttttttttttttttgagatggagtcttgctctgtcgcccaggctggagtgcagtggcacgatctcagctcactgcaagctccacctcccaggttcacaccattctcctgcctcagcctccccagtagctgagactacaggcgcccgccaccacgtccggctaatttttttgtatttttagtagagacggggtttcaccgcgttagccaggatggtctcgatctcctgacctcttgatccacccgcctcggcctctcaaagtgctgggattacaggcgtgagccaccgtgcccggcctgcataacatttttttttttcctgaaattcccagaaaggaaaatggtgtcttgttctatgttgcatttctttgattgagagggagagctgcatcacttaattatttgcagagaattgcttttcttgttttctttacaggtggtctgttcttggatggtctggctgtgttctttctgaggaatacataacctctgctacacattttgcaaggctttatccccgttgtccatgttttgattttatgtataatcaaaaggtttgtgagttctcccgcacttcccaggagtgcctctgggatggaaatgagactgcaggagcagggcttgaggctggaggggtgagatgggacagatgggggtgggggaacccagggcagtggccggtggtggtaatggaggcctcctcacagggaccctcacagcgaccatgcgaatggagcaggactgtgactcaggtctcgctcttctgacctaatcgtgctgctgccccaatgggcagaaccttggggctccagactggacatctctgggctcaaaggatcccactgttcccccggttaccctctcagggttggcctcctgccagtaaccctggcactcattgttcattcttctgactatcgtcagtcataatgagagctcgaactggtgaaagtgcagggagctcaccatgaccccagcccacagaggtcctgggtgcgtccctgccctcgaagcagcactctggatcccagcgccaccctcatgtccatgtttgcacctcattggctgtgacagaaatgagacatcattgtcacacgctggcctgagggtcagtgggccttgctttggacctcagtttccccaccagtaacagggttcagagcagatggtccctgagtgagtcccagctctaagttctcccagggtctcctggacaatgaagcaccagggccaacctccatttgctacaggggacatcctcaggctcttctctgctaagaccccacacctccaagtctcctcattttacctttaaatagctgtttcatgacctgcttttttgacggtaagtagatttttggaaactgaaacccctgacccttcctcccagcctgggcctgcccttggcaggataggaggccttatcggtcctgccacttggtctgggcctcaaagggccaccgccatctgcaggagggccgggtggggttcacagacgctatctgggacttgcctggacacctccaccttctcagctgagtgttgctgccccaccagggagaaccactcacacacagtagtaatagaaataatttaaaattcatgctgcaagttcctgagcgccctcccaacactgaggtgggggctagtctaatccccatcctagaggtgaaaacagtgaaactaggactcacaaggcaaattagcctgttcagggtcaccgagggtccactctcatgggagagtttgcagatgcccaatccggcattctgctgagtgtccagtggcttgtaagtggccagacaccctttgagctcagcctcagctgctcaggcacagaacgtgcctggagcttggaattcaggccagaaaccaccagtggacaccagcattccacactcactgcacaggctggggctcaaaccaaggcccagggacaggaagggacaagccccagccccagccggactcccagcccacacaaaccatcagggcttgtttcctgctccatggaagcctcagacatgtttcataacctcctggagcctccgtttccttatctttccaatgtaatgatgcccatgtgcagtggctcacgcctgtaatcccaagcactttaggaggccgaggtgggtggatcactggagctcaggagtttgaggccagcctgggcaacatggcaaaacgccatctctactaaaaacacaaatattacccaggcatagtggcacatgcctatagtcccagctactcaggaggctgaggtgggaggatcacctgagcttgggaagttgagcctgcagtgagccaagattgtcacactgcactctagcctggaggacagagtaagaagaccctgtaacaaaacaaaacataacaaaacaaacaaacaaaaaacccaactaatgacaataaaataaaccctccctcacagggtggttgtgaggataaagcacccagaatgaagagtgttgctgccatgtgcagaacttagaaagtgctcaacagatgccagccaaacagacatggactcccctcaacacagtcaacccaaggttgactgtcaccaaacgcaaaagaccacactgtaaagcttttagaaatgtggtctagtggccgggcactgtggctcatgcctgtaatctcagcactttggaaggctgaggcgggcggatcacagggtcaggagttcgagaccagcctgaccacctgaccaacgtggtaaaaccccgtctctactaaagattcaaaaaattagccgggtgtagtgctacgtgcctgtaatcccagctgctcgggaggctgaggcaggagaatcgcttgaacccaggaggcggaggtacagtgagctgagatcgcgccattgcactccagcctgggagacagagagagactccgtctcaaaaaaaaaaaaaaaaaaaaagttagccgggtggtagtggcatgtacctgtaatcccagctacttgggaggctgaggtaggagaatcgcttgagcctgggaggtagagggttgcggtgagccaagatggcgccactgcactccaatctgggcgagacactgagaccctgtctcaaaaaaaaaaaaaaaatgtggtctaggagactctcttcactttgagataaaatttgcatcacgtaaagataaccattttaacgagagcaagtcaacggcattcagcacattcagagtgttgtgcaacaaccacttctccctggttccaggacattttcatcgcctcagatggaaacgccctcctcacggaggcatctctcccggcctttgtcctccccggccctgacaaccactaatctactttctgctgggatttgcccattctggatgtttcctaaaaatggcttatctaagccccacagtttcatgcagcacgtagcctctggtgtgtgacgtccttcacttggtgtaatggttcgaggcttgtccatgtcgtagcctgggtcagaacttcattttcatggctgaataatatctcacggtgtggaaatatcacagtttgcttatctgttcatccagtgatggacatttgggttgtttctaccttttggctattgggaatggaagggataacattttttaattggatttttaaagtcactagtttgactgcattaaaattacaaacttttgtttaacgagaatatcactaagatacagagttggggagatctaacacataaaagtgacaaaggaattatatccagaatatttttgaaatttctacaaatcagtgactggcaacacagtgggaaagtggccaagactaaaatactttaataaagaggaaaccgaaatggccagtaaatatgggctcaacctcactaattatcaggaaaatgtaaattaagaccacaagagaaaccactacacactcaccaaaaatcacacacccaataaaaaggtaatttttttttttttttgagatgaagtctcactctattgcccaggctggagtacaatggcgcgatcttggctcactgcaacctccgcctcctgggttcaagcgattctcctgcctcagcctcctgagtacctgggattacaggcgcacaccaccacacccagctaattttgcatttttaagtagagacggggtttcaccatgtgggcaaggctagtctcgaactcctgacctcgtgatctgcccgccttggcctcccaaagtgctgagattacaggcatcagccactgtgcccggcctaaaaaaggctaaaatttaagaagaccaggagtttgactgctatggttggaatgtttgtctcctctaaaactcttgttgaaacttaatccccagtgtggcagcgttgagaggtggggcctttggggtaaggaggttggatcatgagggtcctcccccaaggaatggattaatgagttgtcatgggagtgtggctggtggctttataagaagagagacctggccgggcacggtggctgacacctgtaatcccagcactttgtgaggccgagatgggcggatcacaaggtcaggggatcgagaccatcctggctaacacagtgaaaccctgtctctactaaaaaaaaaatgcaaaaaaattagccgggcgtggtggcgggcacctgtagtcccagctactaggaaggctgaggcaggagaatggcgtgaacctgggaggcggagcttgcagtgagccgagatcgcgccactgccctccagcctgggcgacagagcaagactctgtctcaaaaaaaaaaagaagagagatctgaggtggcacacaagcatgctcagcccacacgacctgcgattaatactctgtgccactttgggactctgcacgagtccccactgggctcgaaacttctcagcctccgtaactataggaaataaattccttttaaaataaattccacagtctcaggtattctattataagcaacagaaaatggagtactacaccgatcatatcaaatgtttagaaggatttggagcaaggagaatgctcgcacaccactagggaaaacataagttggttaaccactgtgaaaaagtttggcattctttactaaagttgaaaatctatatgccctatgacccagcaactttactcctaggtatgtatgtacaaaatagaatttcaggcatgtgggtaccaggtgacatgtaaaggaatgtttattgcagcattattcataatagccaagaactaaacaacacaaagttccagccccagtacaatgaataaactgtggtatattcctacaaggaaatattaatagatacagcaatgaaaatgaacacatataacatggctggtaaatctgacatgagagagtgaaagaagatggacattcagtgtgcagacagttggattaaaaatatttttttaaaggccaggcttggtggctcacatctataatcctagcacttacagaggccaaggcgggcagatcacctgaggtcaggagttcaggaccagcctggctaacacagtgaaaccccatctctactagaaaatacaaaaattagccaggtgtggtggtgcatgcctgtagtcccaactactcgggaggctgaggcaggagaatcacttgaacctaggaggcggaggttgcagtgagccaagatcgcatcactgtactccatcctgggtgacagagcaagactgcgtctcgaaaataaatagataaataaataaataaccaacaggccgggagcagtggctcatgcctgtaatcccagcactttgggaggctgaggtgggcagatcacgaggtcaggagatcaagaccatcctggctaacacagtgaaaccctgtctctactgaaaatacaaaaaaattagccgggcatggtggcgggcgcctgtagtcccagctactcaggaggctgaggcaggagaatggcatgaacccgggaggtggagcttgcagtgagccgagatcatgccactgcactccagcctgagcgacagagcgagactccatctcaaaaaaataataattaaaaataaataaattaaataaataaataacagattgcataaagtggctcatgcctgtaatccaagcactttgggaggccaaggcagaaggatcacttgagcccaggagttcaggacaagcctgagcaacatggtgaaaccccacctctacaaaaaaaaaaaaaaaattagctgggcatggtggcatgtgcctgtgatcccagctacttgggaggctgaggcaggaggatcacttaagcctgggaggtcgaggctgcaatgagctatgatcgtaccactgcactccagcctgggcaatagagcaagaccctgtctcaaaacaaataaacaaaagccagacagacacaaatgagagcattctgtatcgtttcatttctatgaaggtgaaaagcaggcaaaaacaaccaaagtgcttgcagatgcatatctgagtagttaaaaacttactgaaaagcaggcctggctcacgcctttaatcccagcactttgggaagcgggcggatcacgaggtcaggagatcgagaccatcctggctaacacggtgaaaccccgtctctactaaaaatataaaaaattagccaggtatggtggctagtgcctgtggtcccagctactcgagaggctgaggcaggagaatggcatgaatccgggaggtggagcttgcagtgagctaagatcgtgcaactgcactccagcctgggcagcagagcgagactccctctcaaaaaaaaaaaaacttactgaaaagcaagaagtcaggtggaggttacctttggggaggattggggtgctgtccgctttctaataattcgttaaactatagtctacatcttgtgctatatttcacaatggaaaaacagaaaagagctcctgcccataacgctgctttgcaggtttggaaatttcagattcaattcctctccttgcgggggccaaggatgggaagagcaggtggttccagtagggaaagaggaggccctggggcctcaaaatggctaaggaccattcctcagcgtgggtggcacctaccctggaaacaggactctacttcctcctctgttagggggcagagcagccctgcagtgccttctgggcacaggtcctcactctgcagctggaggaattctcccaggcactgagagcccttcacggcccaaatgccccgtgcgctcggcctctggacttgccttccctgctctgtatatctccctccgcctgaccctcagcctcctccatcactcactgtcttctctgccagtctattcatctgtctctgtccctctctctgccaccttctctcctattgagaagccgaaacctcaggcacagacccacatcccctcctcatgggcccatgtgcccaaggtgcccctaggtgccaggctgagatgaaccaggagtgtccttctgaacccagcaacagcgaagggtgaccagggagggccagttcatctcggtctgaaagaagccccagatgagcaaaggatacactggcctcctgcggtcagcagcacttcccaggacagtgagcaagacaggggtaaggccagagtgggtgggcacacccatgggagagaggagccgctgtgaaatgtgcacgaggaacagaccagcaaggaggatccacgcagtgctagaagggagttcctggaagcctggtggagagcccctcccatctgctaagcccggagggcatcaaaggctgctgctgccctcaacccctgacaatctcatcatctcatatctcaggcatggaagaatgagggccattacacgagtaaaacatcaagtacactccagcctggatgacagggccaggctccatctcaaaaaaaaatgcctgtggtcaaagctctcctgacaggggaaaacaaaacaaaacaaacttctccttaaagaaaacatttgcctttgactgcatcataattccagcaggattttgtgcagataactctttggctaactctaaaattaatacagaaaggtaaagaaattagaatagccaaagaaattttgaaaaggaagaataaagcgagaggaatcacattcctcaatttttaacagctctattgagataaaattcacataccatacggttcacccatttaaagtgtataattcaggccgggcgcggtggctcacgcctgtaatcccagcactttgggaggctgaagcgggcagatcacctgaggtcgggaattcgagaccagtctgaccaacatggagaaaccccgtctctactaaaaatacaaaattagccaggcgtggtggctcatgcctgtactcccagctactcggaagactgaggcaagagaattgcttgaacccgggagacggaggttgccatgagccgagatcgcgccaccacacccagctgccattttttaattgattacttgtctatttattactgagttgtaagatattttgggccaagcacggtggctaacgcctgtaatcccagcactttaggaggctatggtgggcaaatcacttgaggtcaggagttcgagaccaggctggccaacatggcaaaacaccatctctactaaaaatacaaaaaaattagccaggtgtggccaggcgtggtgactcacgcctgtaatcccagcactttgggaggccaaggcgggtggatcacctgaggtcgggggctcaagaccagcctgaccaacatggagaaaccccgactccgctaaaaatacaaaattagccgggtgtggtggtgcatgcctgtaatcccagctactcacgaagctgaggcaggagaatggcttgagcccaggaggcagaggttgtggtgagctgagatcatgccattgtactccagcctgggcgacaagagcgaaattctgtcacaaaaaaaaaaaaaccattagccagccatggtgatgcacacccgtggtcccagctactcaggaggctgaggtatgagaattgcttgaacccaggaggcagaggttgcagcgagccaggattacgccgctgcactccagtctgggtgacagagcaagactctgtctaaaaaaaaaacaaaaacaaaaaagatattttgtatgtgtttggataacttccctatcagatatatgatttgcaaatatgtttctctcattctgtgagacatcattcaattttaagacatcacagagctatgttaatcaaggcactgtggctgtggtaaaggatagacacacagaacagaacagagagcccagaaatggacccgcaaacctatgccccattcattttttacaaataagtgcgagaagccaactgaatagaaagcgtatagctttttcaaaaaacagtgctggaacaattggacatctgtaggcaaaaaaacaaacaagcaaacagaagaatctggacctgcccttcacacctcagacaaaagtcatctcaaaatggattgtagatctcaatataaacataaactatacaactttagaagaaaatataggtgaaactctttgtgttctgtggttaggcagacagttcctaggcatggcactaagtaagattcatttaaaattttttgacaaattggactttattaaaacttttgctctacaaaagacaatattaagagaatgaactaacaagctacaaactaagagaaaacatttgcaaattgcatatctgacaagggattgcttccagacgatacacagaattctaaaaattcatccttaagagaataaaccacccaatttttaaatgggcaaaacaggccaggcgtggtggtgcacgcctgtaatcctagcactttgggaggccgaggcaggcggatcacaaggtcaggagattgagaccatcctagctaacacggtgaaaccctgtctctactaaaaatacaaaaaattagccaggcatggtggcaggtgcctgtagtcccagctactcgggaggctgaggcaggagaatggcgtgaacctgggaggcggagcttgcagtgagtggagatcgcaccactgcgctccagcctgggcaacagagcgagactccgtctcaaaaaaaagacaaaatacttgaaaagatattggctaggcgcgctggctcatgcctgtaatcccagcactttgggaggccaaggcgggtggatcacaaggtcaggagttcaagcagcctggccaagatggtgaaaccccgtctctactaaaaaaaaaaaaaaaaaaaaaaaaaaaattggccgggcacagtggctcatgcctgtaatcccagcactttgggaggctgaggcaggtggatcaggagtcaggagatcgagaccatcctggccaacatggtgaaaccccatctctatgaaaatacaaaaattagccagagatgatgccgggtgcctgtaatcccagctactcatgaggctgaggcagaagaatcacttgaaccagggagtcagaggttgcagtgagctgagatcgcaccactgcactccaccctgggcgacaaatcgagattccatctcaaaaaaagaaaaaaaaattaaaaggaatatttgcctcattatgttacaataactaatatggaaagcaatattgcaatgcctattagcacatgacattaggtgaattctcctttgtccccggacctgctgcctcctcctgcttgtcaggggacagatccagtacatctcccctcagcgctgggtggacctaacccttgctttcttggaggaaacccaggaatccagagacaaagtggaagggtactggcatgtggttgggcagggctgcctgaggtcggtgtcagccgaccgtggggcttggtcccaggaggctgcttactgggccctgctcctctggtttcccccaagtcgtgattctgaaatgaataaggacggtgcagaactggactacaaatgcaggagtgacttcctgggagggtggggcccctatctctcctagactctgtggtcagactctggccaacaccccctgtaaggccacaggagaggaacaggagtgatagcccccaaaccccagtcccaccaggccctgagggcccctttgtcactggatctgataagaaacaccacccctgcagccccctcccctcacctgaccaatggccacagcctggctgggcccagctccctgtatataaggggaccctgggggctgagcactaccaaggccagtcctgagcaggcccaactccagtgcagctgcccaccctgccgccatgtctctgaccaagactgagaggaccatcattgtgtccatgtgggccaagatctccacgcaggccgacaccatcggcaccgagactctggagaggtgagtgtcagacgggactgccagagggactgggtgggaggccaggtatgtgagtggggacagtggggagggggcggtggggaggggacagtggggaggggaccatggagaggagacagtggggagggcactgtggggagaggacagtgaggaggggaccttggggaggggacagtgaggagggaaccgtggagaggggacagtgaggaagggacagtgaggacagatagcgttccctctcagtgaggagagcagggtaaggagggaacgattaggagttgcacaaccatctgggctcgctgagacctgggcaggcacaggcccaggttctgacaagcagagggtgaaaggtttcgttctaggcctgaagggccttacagggcagccagggcactacagcctctaaagtcccagcatctgggatcagggcactgtcccagcttcaaattcccagcatctgatcccctgggaggggccagggagcttttccttccctggaacgctgctgggaggtcatgagcctgcagaaggggtggcgggcaacccagtctggggctgggagggaggtcctgtggccagaggagacggtggaggggctgggggcaccaggcgtgctggaggcggagggcgggagatttggggaccaggctgcacagaacccgtcggaagcagggcgatcagccgggagctgcagaggcctggggggcctctagcccagggcagcctgggaggggcagctgcctgggcacccgggccccgcgaggaggggctggggcctgctgcggggtcgcagatgtgtcccggtgctcggagagggccgcagggcgcgtgggccgtggcgggaggccgcgctgctgggagctcacggcccccgccccccgtcccaggctcttcctcagccacccgcagaccaagacctacttcccgcacttcgacctgcacccggggtccgcgcagttgcgcgcgcacggctccaaggtggtggccgccgtgggcgacgcggtgaagagcatcgacgacatcggcggcgccctgtccaagctgagcgagctgcacgcctacatcctgcgcgtggacccggtcaacttcaaggtgcgcggggcgcggtgcgggcggggcgggacggggcggggcgcggtgcgggcggggcggggcggggcggggcggggaggggcggggaggggcggggtcgcggggcggatgcgggggtcgccgggcggggcccgggctaggccccgccccctcactgagccgcccccgcccccagctcctgtcccactgcctgctggtcaccctggccgcgcgcttccccgccgacttcacggccgaggcccacgccgcctgggacaagttcctatcggtcgtatcctctgtcctgaccgagaagtaccgctgagcgccgcctccgggacccccaggacaggctgcggcccctcccccgtcctggaggttccccagccccacttaccgcgtaatgcgccaataaaccaatgaacgaagcagcgtccacctggtctctgttgtccgtgggcggcgggcgcttggggaggcggagcgggaggagggcgccccggctgtctcggggccactgctgggccgcagggatccttgcaccgaccccagggtctctaagaggcagagggatgtgcagctcccggggcgggagcgggggtcactcgggacccaggcgtggtggagaaggggtgcagttaggcctttgcggaggggggagcagtgctggcgcccacccgccgcggctctccctgggacctccgtggtcttccttctttatttctcccgaatgtgtactatttcctgatttcagaacgatcaggacgaagaggggagggatgggcgtctgcgctcactcattccttcttccattcctcaatgaaacatttactgggcataagacagcctaggcatgtttctaggctatggataccgcagctgaaataaagaaagccctctgccccgtggggctgacaatctagtgggggatacagacgtgatgaagacagtcagatcacagttcacagaaatgagacaggaaaagaggctgagcctcactcataagagaaacgcaagttaaactacacaaaaataaaaaacctcactgagatccatgtctcacctccctgataggcaaaaatccaagagtttgatcagactgcaggcgcccctcctccactgggcacccctcatccagggcagagggaaccagcccggggcgcaagtccaccggggcatctcatttgctaaagacctgaaaacccaggtgtccatcatcaggactaactggaaaaaccaagggtatccgcaccatggagagctcgactgaaaaaaaaaaatgaggataattggataatttctttttttttttttttttttttcagacggagtctcgctctgtcgcccaggctggagtgcagtggtgcgatcccggctcactgcaagctccgcctcctggtttcaagcgattctcctgcctcagcctcccgagtagctgggtctacaggcgcccgccaccacggctggctaattttttgtatttttagtagagacggggtttcaccgtgttagccaggatggtctcgatctcctgacctcgtgatccacccgcctcggcctcccaaagtgctgggattacaggtgtgagccaccgcgcccgacctaaaatgaggataatttctaataatgaaaataaagaggttagaatggtgtgtatacaatggtggaacagaggagaaacacgaatatgtgtgtgcacatatatgtgagcttatgcataactatgtatgaggctgcgtgtggacatgtgtgtttgtgcacaaccatgtatgtgcccgcatgtgcttatttctgcaaaaataaaccatggcaggacaaaccggaaatgaatacaaataataaggtgggtggggatggaggggaaggtggaaggaagctcctgcaagtctgactctctacatagttttgacctttgatttgtgtaaatattttacattatcaaaaataaattcaggctgggcatggtggctcatacctgtagtcctagcactttgggagtccaaggggagaggattgcttgaggccaggagttgaaggccaccctggccaacatagagagaccctgtctttaaaaaaaattacaaaattaaggccgggcgcggtggctcacgcctgtaatcccagcactgtgggaggccgaggtgggcggatcacgaggtcaggagattgagaccgtcctggctaacacggtgaaaccccgtctctactaaaaagtagaagaaattagccgggtgtggtggcgggtgcctgtagtcccagctacttgggaggctgaggcaggagaatggtgtgaacccgggaggcggagcttgcagtgagccaggttcaagccactgcccttcagcctaggtgatagagtgagactccttctcaaaaaaaaaaaaaaaattacaaaattaataagattaaaataaaaagaggggccttgccagtggctcaagcctctaatcctaccacttgggaggccaaggctggaggatcccttgatgccaagagtcggaggccagcctaggtaacacagcaggacctcgtctcaaaaagattaaaaaattaactgggcatggtagcctccaaattgggggttagcctgggaggtttgcccaggaaggaattcaagggcaagctggtggtgttacacagcaactctgattgatatcgaagccacagcagacagcaggagcagaacactgctccttacagagcaggggtaccccataggctgtgtgcacaggagagcaactcagaggcactgctgcactcatctttatacccacttttcattatatgcaaattaagggaaagttatgcacaaatttctaggatgagtgtggtaacttctgggtggtccagtcactgccatggaaagggatggtaaactcccatggcacactggtgggtgtgtcttatggaaagctgcttctgccctacttgttttagctggtcctcagtttggtccggtgtccgagcccaacatccggagtacatgcagagtcccacctcctacgtcacacctgcagttccagctactcaggaggctgaggctggaggattgctggagcccagatgttgaaggctacagtgagctatgattgtgccaccgcacttcagcctgagcaacacagcaatactctctctctaaaaaagcaaagcacacaaacaaaaagagtgactgggtgcagtggctcacacttggaatcttagcactttgggaggccaaggtgggatggtcacttgagcctgggagttcaagaccagcctaggcaacatagcaagactttatctctactaaaatatatatatattttttaattagctggacatggtggtgcacctgcagtcccagctacttgggaggctgagttgggggtggaggggagtatcacttgagcccagaagttccaggctgtagtaagctatgattgcaccactgcactccagcctgggcaacagagagagaccttatctatatttaaaaaaaaaaaaaaaaagagagagaaaattgaaaactcctaattgaaaacccccaaattgaaaactaacttaaataaatgagccaatgtaagaatgtggtgatataataatcagaaaaaaggattgttccaggtgacctctgaacacagaacctcggctatgaccgaaagaactccaaagacactctaacactccgtggtttattgttcctcataacatatataaaataatttcataagcttttattttgaaacatattcagattatgaagaaataaaaacaccctgcaagaataagacaaagatggagaaggaaggatgactgctggtgggtttggggcttttggagggtgatggaaaccttctaaaattgattatggtgatggtcgcacaattatgtgaacacattaaaaattattgaaatgggccgggggtggtggctcacccctgtaatcccagcactttgggaggccaacgcgggcagattacctgagctcaggagttccagactaacctggccaacatggtgaaacccccgtccctactaaaaatgcaaaaattagccacgcatggtggcacatgcctgtaatcccagctactggggaggctgaggcaggagaattgcttgaacccaggagacagaggttgcagtgagccgagattgtgccactgaactccagcttggccgacagagtgagactctgtctcaaaaaaaaaaaaaattattgaaatgtacacattaagtgggtgaattttatctcaataaaactgttaaataaaataacaagaatatgaaaaactcttgaatactactcatccagactctccagctgttaacattctaccacatcggcttgctctctcttgcccccacttgctctttctctcggagcccttggagaggggtatgcaaatatccgtactctaaatatcctccatatactgtgtatttcctaaaatcaacaaggacattaggctgcacagccagagaacaaccatcaaaatcaggttaatattgatccaaatccatctatcaacagaagcaacatcaagttcaagacccttttgaaagcaatgataccagccatttactccatccctaaaggactgagggtgctgcgaatttaaccgtatcaatgcagtctttttgatgttatttactgaaggaaatggatgttctttaaaatatgtatttatttatttttcttttttgagacggaatcttgttctgtcgcccaggctggagggcagtgggacaatcttggttcactgcaacctctgcctcctgggttcaagaggttctcctgcctcagcctcccgagtagctgggattacaggcgcgaaccaccacgcccggttaattttggtatttttagtagaggcggggttttaccatgttggccaggctggtctcaaactcctgacatggtagcctgtaatcccagctactcgggaggctgaggcaggagaatcgcttgaacccaggaggtggggttgcagtgagccaagatcgtgccattgcactccagcctgggagacagagcgagactccatcaaaaaaaaaaaaaaaaaaaattcctgaagctcctcttgagcttacattctagtggactgtaaacagaaacatttttttttcctgtggataaagaaaagcagggcaagtaggggcttagacagaggaggggaggattcagattttaaatgggttggccactgtaggtctattaacgtggtgacatttgagggagtggcaatactagggaaggggcttcaggggagtggccaggagctagggatagagggagggaggacaggaggccttgtctgtcttttcctccatatgtaagtttcaggagtgagtggggggtgtcgagggtgctgtgctctccggcctgagcctcaggaaggaagggcagtagtcagggatgccagggaaggacagtggagtaggctttgtggggaacttcacggttccattgttgagatgatttgctggagacacacagatgaggacatcaaatacatccctggatcaggccctggggcctgagtccggaagagaggtctgtatggacacacccatcaatgggagcaccaggacacagatggaggctaatgtcatgttgtagacaggatgggtgctgagctgccacacccacattattagaaaataacagcacaggcttggggtggaggcgggacacaagactagccagaaggagaaagaaaggtgaaaagctgttggtgcaaggaagctcttggtatttccaatggcttgggcacaggctgtgagggtgcctgggacggcttgtggggcacaggctgcaagaggtgcccaggacggcttgtggggcacaggttgtgagaggtgccctggacggcttgtggggcacaggctgtgagaggtgcccaggacggcttgtggggcacaggctgtgagggtgcccgggacggcttgtggggcacaggttgtgagaggtgcccgggacggcttgtggggcacaggtttcagaggtgcccgggacggcttgtggggcacaggttgtgagaggtgcccgggacggcttgtgggacacaggttgtgagaggtgcctgggacggcttgtggggcacaggctgtgagggtgcctgggacggcttgtggggcacaggttgtgagaggtgcccgggtcggcttgtggggcacaggttgtgagaggtgcccgggacggcttgtggggcacaggttgtgagacgtgcccgggacggcttgtggggcacaggctgtgagggtgcccgggtcggcttgtggggcacaggctgcaagaggtgcccgggacggcttgtggggcacaggctgtgagggtgcccgggacggcttgtggggcacaggctgtgagggtgcccgggacagctcgtggggcacaggttgtgagaggtgcccgggacggcttgtggggcacaggctgtgagggtgcctgggacggcttgtggggcacaggttgtgagaggtgcccgggacggcttgtggggcacaggttgtgaggatgcccgggatggcttgtggggcacaggttgtgagaggtgcctgggacggcttgtggggcacaggctgtgagggtgcccgggacggcttgtggggcacaggctgtgagaggtgcctgggacggcttgtggggcacaggctgtgaggatgcccgggacggcttgtggggcacaggttgtgaggggtgcccaggacggcttgtggggcacaggctgcaagaggtgcccaggacggcttgtggggcacaggttgtgagaggtgcccgggacggcttgtggggcacaggctgtgagggagcccggcacggcttgcagctacagggagaaaagacttggtgctgtgggcctgccttggggctggtggtacagcccttatctgctgccctcaggatctcccggcccctctcgtccaggcccctgcaaccccatgccccagcctctgaggaccaaaggcgcccctgcttgggaagagggggctcaggggagtcgcctgacccggttccaagccaggctgatttaccgttgctaacatcctatcgcacgcatccctctgcctcatgcacccaaccccaaggcctggtacactgcaggccccaaggtcctgtgcgtcctttcaataccctcctcacctgcctcacctgccccccctaccctgactctggctggagaccccctccagggagttttcaaaacaaagggtgtcagtctcctgtgggattccctcacctctgcagcctgcggtctgaaagctgccccatggtgtgtagtgctaaacttccaacttactccaggccagcggtgacagcccgagggcaggaagggcacccacactgagcctcaaacagctaattttgcaactgtaagtccatataattgtcttgaaaagtaatttgtttcaaaaagctaaaaaacgaatactcttgagtctccttctagtaattccccttctagaggtctatcaccaggaaaagatccaaagcactgatattcttcatggagttgtttataatagaaaaaaactagagcttgttcacaaaggggagctctgcaggctgaagatgttgcacctgtcagcggggatgggggcacgcttgctgacgcagcaacggaaaagcatcagtgtgtgaagatgcattttctctctttctattattattatttttatttttattttttctgaggcagaacctcgctctgtcacccaggctggagtgcagtgatgcgacctcatcacaaccacgagccaccatgtgcggccccatgagcaagccaccacgcccagcctttttttcccttgttttaaaaaatcctctatttaaaaaagatgtgcatgggccgggcacggtggttcacgctcataatcccagctctttcagaggccgaggcaggcagatcacctgaggtcaagagttcgacaccagcctggccaacatggtgaaattccatctgtactaaaaatacaaaaattagccaggccgtggtggtgtgtgcctgtaatcccagctactcaggagactgaagcaggagaatcacttgaacccaggaggcagaggttgcagtgggtcaaaatcatgccaccacactccagtctgggagacagagcaagactccatctcagaaacaaactaacaaacaaaatttttatatctacctataattcgtataaatttaaaatacatgcataaaatcataccctttgcaagcacacgtactaactaaaaggaatatattcagcacatagaaatggttgtctaacggaggaggggggagttaataaacagagaggataaaaagaaataaatcagtagagctggaggagggtctcctccaggctgcgatgagaacatagtgagcagaattgcaggcctgcatgacctcaccttctgtgaggagtccggcctcccaagacgctttcctgcctaggtgcccggctcagagtgtcccctacaaggctactggaggagaaccccagaccgagcctcattcaggtgagggggctgcacaccggaggtgggagaggtctgtcccttcccaccctgtgacactgggtcccactttctctctagggggtctcggtttcctcatttgcaaactggagctcataaggtgggccagagaagtttcagtgaagtgaggaatggatcgtccctctgccagggcccatgtgctctaggtcaccctgtcatcacagggacagggaggtcaaggacagtcactcctgaggccagtccgggctgggctgaccacgtggactctcatgcccagattggggccccaatctccctgaagctggggctccagctgtgactcaggggtgggcagaaggggagacagaagcgataggttcctcagcccccagtcccacctgagggcccctttgtcactggatctgataagaaacaccacccctgcagccccctcccctcacctgaccaatggccacagcctggctgggcccagctccctgtatataaggggaccctgggggctgagcactaccaaggccagtcctgagcaggcccaactccagtgcagccgcccaccctgccgccatgtctctgaccaagacttaggggaccatcattgtgtccatgtgggccaagatctccacgcaggccgacaccatcggcaccgagactctggagaggtgagtgtcagatgggactgccagagggactgggtgggaggccaggtatgtgagtggggacagtggggagcgggcagtggggaggggaccgtggggaggggacagtgagtaggagacagtggggagaggacagtggagaggggacagtgaggaggggaccatgggaaggggaccgtggagtggggacagtgaggaggggaccatagggaggggacagtggggaggggacagtgaggaggggaccgtggggaggggacagtgaggaggggaccgtggggaggagacagtgaggaggggaccgtagggaggggacagtgaggaggggaccgtggggaggggacagtgaggaggggaccgtggggaggggacagtgaggaggggaccgtgggaaggagacagtgaggaggggaccttggggaggggacagtgaggaggggaccatggggaggggacagtgaggaggggacaatggagaggggacagtgaggaggggactgtggggagaggacagtgaggaggggaccatggggagggcacagtggggaggggagagtgaggaagggacagtgaggaggggactgtggggaggggacagtggagacagatagccttccctctcagtgaggagggcagggtaaggagggaacgattaggagttgcacaaccatctgggctcgctgagacctgggcaggcacaggcccaggttctgacaagcagagggtgaaaggtttcgttctaggcctgaagggccttacagggcagccagggcactacagcctctaaagtcccagcatctgggatcagggcactgtcccagcttcaaattcccagcatctgatcccctgggaggggccagggagcttttccttccctggaacgctgctgggaggtcatgagcctgcagaaggggtggcgggcaacccagtctggggctgggagggaggtcctgtggccagaggagacggtggaggggctgggggcaccaggcgtgctggaggcggagggcgggagatttggggaccaggctgcacagaacccgtcggaagcagggcgatcagccgggagctgcagaggcctggggggcctctagcccagggcagcctgggaggggcagctgcctgggcacccgggccccgcgaggaggggctggggcctgctgcggggtcgcagatgtgtcccggtgctcggagagggccgcagggcgcgtgggccgtggcgggaggccgcgctgctgggagctcacggcccccgccccccgtcccaggctcttcctcagccacccgcagaccaagacctacttcccgcacttcgacctgcacccggggtccgcgcagttgcgcgcgcacggctccaaggtggtggccgccgtgggcgacgcggtgaagagcatcgacgacatcggcggcgccctgtccaagctgagcgagctgcacgcctacatcctgcgcgtggacccggtcaacttcaaggtgcgcggggcgcggtgcgggcggggcggggcggggccgcggggcgggcggggccgcggggcggggtcgcggggcggggcggggtggggtcgcggggcggggcggggtcgcggggcggggcggggcggggcggggcgggcggggcggccggggcccggcggggcggggcggggcggggaggggctgggcggggcggggcgcggggcggggcgggccgggccggggcggggtcgcggggcggggtcgcggggcggggcgcggggcggggcggggcggggtggggtcgcggggcggggcccgggctaggccccgcccccgcactgagccgcccccgcccccagctcctgtcccactgcctgctggtcaccctggccgcgcgcttccccgccgacttcacggccgaggcccacgccgcctgggccaagttcctatcggtcgtatcctctgtcctgaccgagaagtaccgctgagcgccgcctccgggacccccaggacaggctgcggcccctcccctgcccttcaccctcccacagttcctgccctgactccaataaatggatgaggacggagcgatctgggctctgtgttctcagtattggagggaaggaggggagaagctgagtgatgggtccgggggcttcgcaggaactcggtcgtccccactgtcgtcgcggcctggggttcacttggggggcgccttggggaggttctagcccctgagcaccggagctgcggcccgggtggagcggagcagtcccgggccggcccgcggcgtctcctggggtccttgagtcggacgggcgtttgtgcgtctcccggcttcccatatcgcacaaagattgtcacttcactaagcgtattggaagcgtgtcggggctcagggaacttttccacaaagcctgacgtccgaatcccgggactctggcagctacgggggtccctgaggccggtccctccccgactcctaagagagtagggggtttcctgcccggtgttctctctccggttcctcccatgtgctccctcctggcagagcagtaactttacccgaggggagtaaacagatgcccctaaagtctgcagtaaaggtgcccacgcgcaacggcgtgggtcaatgccagaaaccctgggatcccggaggtcgaggcctccacacagacgggaacccgggctggttacgttccccggcgcaggccgagggtccccgcgttcccgccgcgctcgggccgataaggacgggcggggtgcccggaggctctataaggaggccagggcggcgggcgcggcccccagagcacgtcaggcggcgccatgctcagcgcccaggagcgcgcccaaatcgcgcaggtctgggacctgattgcgggccacgaggcgcaattcggggcggagctgctgctcaggtcggtagaggcggggtctccgggagctcagggaggtggagatgagggttttgggcgcgtgggccgccaacgccatccaaggtccttcgggtgcggatccccgggctctgggcggtgtgggcgctagtgaagccccacgcagccgccctcctccccggtcactgacctggtcctgcaggctcttcacggtgtaccccagcaccaaggtctacttcccgcacctgagcgcctgccaggacgcgacgcagctgctgagccacgggcagcgcatgctggcggctgtgggcgcggcggtgcagcacgtggacaacctgcgcgccgcgctgagcccgctggcggacctgcacgcgctcgtgctgcgcgtggacccagccaactttccggtgaggcctttccggccggggcaatggtgcagcgcgcagccggggtgggggggctctgggggtccctagcggggcagaccccgtctcaccggccccttctcctgcagctgctaatccagtgtttccacgtcgtgctggcctcccacctgcaggacgagttcaccgtgcaaatgcaagcggcgtgggacaagttcctgactggtgtggccgtggtgctgaccgaaaaataccgctgagccctgtgctgcgcaggccttggtctgtgcctgtcaataaacagaggcccgaaccatctgcccctgcctgtgtggtctttggggagctagcaaagcgaggtcactattgttggccagtgaagctcagggacctaaaaggagcctcctagaactctcaaatgcgccccacccccggaggtttgtcctcccatggcgaggagtgcgatggggcagagggagcactgtgatgtggcgggggtagggagggtggccttcgacttcaacccttgaatcgggcttccaaccatactgttcgcaaagcacttccccattcacgcatttattcattcattctccctccatccccacttcctgctgggacctgtagatgctaatcctggccctttttgcagagagatgcagaaactgaggtcccagagccaaatgtgcaacctaattcgttggcccagagcagagggctccgcagacctgttcctttccccttccttcccccatggacacttcctcagtggcaaacctgcgctagcctggttagccctccctgtgaccctgcagccctggggatgaggtcgggaggaagtcctcagtggccacaatttggcagacagagcaggtttagtcttccagcctgctcaatgacaagctgtgcgaccctgggcgtgtcccagagctctcaggcctttacctatcgaatagaaaaacaacgtccaactcacgagatttttgaaataatttttgaaatcataacacagggtgggtgcctgcagggtcgttgccaccccacccctccacccagccccagctgccgtgtctcaatctctgcaggtgcccaggccaaggcactcccttccccaggttccctcttctccctccccaggactgggaagggaatcttagggctccaccccaggcttttcagacaaagaataggggctgaggaaagagtgggaccttggaggtctccaaaccctgaatagggttggctctgggttggccatcctgggtctgtgtggggagcactggaccaggcctggcacccaggtctgacctggcagtcagcaacgaggtctgaagagagctgctggaagtggagccctgactgtgagtcggccaaactccccccagcagtcagtgccagtgacctgttgccctgcactgcctgggaccccagcccggtagtttggagaacttggccccacgttatctacatcccccaactgtttttttgtttttgggggttttttttttttttgctttgtttttgtttttgagataggcccttgctctgacaccccggctggagtgcagtggcacagttttggctcactgcagcctcaacctcctgggttcaagcgattctcctgcctctgtctcccgtgtagctgggattacaggcatgggccgccattcctggctaatttttgtatttttaatagagacacagtttcaccatgttgatcaggctggtctcaaactcctgacctcaagtgatctgccctcctcggtctcccaaagtgctgggatgacaggcgtgagccaccacacccagcccccgcaactgtttacatggataattaacagctttttgtcccaggcagagtttggtgtgaaagcagcttatgtttcactttggaaaaactgtgctcttctccccatccaggaagctgcctgggtctgggccatatgtggataccttatgggtataagctgctcaggaccctgtgtggaagctcaggacaatgccagcgggaaggctaccatgtggagagctggtctctgtttgggcaggactaagagacgcagggcagccttgggcaacctgtctactctcactcactcctcctcccctttcctgtgccaggcacctcctggcaacttgccagccaatgaccctgcatcccaggcataagagctcctactctcccccacctttcacttttgagcttacacagactcagaaataagctgccgtggtgctgtctcctgaggacaaggctaacaccaaggcggtctgggagaaagttggcaaccacactgctggctatgccacggaggccctggagaggcaagaaccctcctctccctgctcacaccttgggtccaacgcccactccagggctccactggccacccctaactattcttaccctggacccagcccccagcccctcactctttgcttccccctgaagcatgttcctgaccttcctctcacttggccctgagttatggctcagcccagatcaagaaacaatgcaagtaggtggccgacacgctgaccaatgccgtggtccacttagatgacatgcccaatgatgtgtctgagctgaggaagctgcatgtccacgagctgtgggtggacccaggcaacatcagggagagctttgggctgggaggaatctagggtgtgggggcagctggccttcctcataggacagaccctcccacgcgttcagggaggtggagcacaggtggcagtagtatctgcatcccctgactctctctccacagttcctgggtaaatgcctgctggtgacctaggcctgccacacccttcccagtttacccatgtggtgcctccatggacaaattatttgcttttgtgagtgctgtgttgacctaaaaacaccattaagctagagcattggtggtcatgccccctgcctgctgggcctcccaccaggccctcctcccctccctgccccagcacttcctgatctttgaatgaagtccgagtaggcagcagcctgtgtgtgcctgggttctctctgtcccggaatgtgccaacagtggaggtgtttacctgtctcagaccaaggacctctctgcagctgcatggggctggggagggagaactgcagggagtatgggaggggaagctgaggtgggcctgctcaagagaaggtgctgaaccatcccctgtcctgagaggtgccaggcctgcaggcagtggctcagaagctggggaggagagaggcatccagggttctactcagggagtcccagcatcgccaccctcctttgaaatctccctggttgaacccagttaacatacgctctccatcaaaacaaaacgaaacaaaacaaactagcaaaataggctgtccccaatgcaagtgcaggtgccagaacatttctctcattctcaccccttcctgccagagggtaggtggctggagtgagggtgctggccctactcacacttcctgtgtcatggtgaccctctgagagcagcccagtcagtggggaaggaggaaggggctgggatgctcacagccggcagcccacacctggggagactcttcagcagagcaccttgcggccttactcctgcacgtctcctgcagtttgtaaggtgcattcagaactcactgtgtgcccagccctgagctcccagctaattgccccacccagggcctctgggacctcctggtgcttctgcttcctgtgctgccagcaacttctggaaacgtccctgtccccggtgctgaagtcctggaatccatgctgggaagttgcacagcccatctggctctcagccagcctaggaacacgagcagcacttccagcccagcccctgccccacagcaagcctccccctccacactcacagtactgaattgagctttgggtagggtggagaggaccctgtcaccgcttttcttctggacatggacctctctgaattgttggggagttccctccccctctccaccacccactcttcctgtgcctcacagcccagagcattgttatttcaacagaaacactttaaaaaataaactaaaatccgacaggcacggtggctcacacctgtaatcccagtactttgggaggctgaggcgagaggatcacctgaggtcgggagtttgagaccagcctgaccaatatggagaaaccccagttatactaaaaatacaaaattagctgggtgtggtggcgcatgcctgtaatcctagctactaggaaggctgaggcaggagaatcgcttgaacccgggaggtggaggttgaggtgagctgagatcacgccattgcactccagcctgggcaacaagagcaaaactccgtctcaaaaaataaataaataaataaataaataaactaaaatctatccatgctttcacacacacacacacacacacacacacacacccttttttgtgttacttaaagtaggagagtgtctctctttcctgtctcctcacacccacccccagaagagaccaaaatgaagggtttggaactcagcccatgggccccatcccatgctgagggaacacagctacatctacaactactgccacaggctctctttttggacaaaaataccatcatactgtagatacctgtgtacaacttcctattctcagtgaagtgtctcccctgcatccctttcagccagttcattcagctctgcgccattccacagtctcactgattattactatgtttccatcatgatccccccaaaaaatcatgactttatttttttatttttattattattatttttttttttttttttgtgacggagtctcgctctgtcacccaggctggagtgcagtggcacaatctcggctcactgcaagctccacctcgcaggttcacgccattctcctccctcagcctcccgagtagctgagtagctgggactacaggcgccccccactacgcctggctaattttttctatttttaatagagacagagtttcactgcattagcgaggatggtctcgatctcctgacctcgcatctgcccgcctcagcctcccaatgtgctgggattacaggcgtgagccaccgcgcccggccttatgtatttatttttttgagacagagtctcgctgtgtcgtcaggctagagtgctgtggcacgatctcggctcactgcaacctccaactccctggttcaaaggattctccagcctccacctcccgagtagctgggattacaggcgtgcaccaccacacccagctaatttttgtatttttagtagagacggggtttctccatgttggtcagcctggtctcgaactcccgacctcagctgatccacccgccttggcctcccaaagtgctgggattacaggcgtgagccaccgagcctggccaaaccatcacttttcatgagcagggatgcacccactggcactcctgcacctcccaccctccccctcgccaagtccaccccttccttcctcaccccacatcccctcacctacattctgcaaccacaggggccttctctcccctgtcctttccctacccagagccaagtttgtttatctgtttacaaccagtatttacctagcaagtcttccatcagatagcatttggagagctgggggtgtcacagtgaaccacgacctctaggccagtgggagagtcagtcacacaaactgtgagtccatgacttggggcttagccagcacccaccaccccacgcgccaccccacaaccccgggtagaggagtctgaatctggagccgcccccagcccagccccgtgctttttgcgtcctggtgtttgttccttcccggtgcctgtcactcaagcacactagtgactatcgccagagggaaagggagctgcaggaagcgaggctggagagcaggaggggctctgcgcagaaattcttttgagttcctatgggccagggcgtccgggtgcgcgcattcctctccgccccaggattgggcgaagccctccggctcgcactcgctcgcccgtgtgttccccgatcccgctggagtcgatgcgcgtccagcgcgtgccaggccggggcgggggtgcgggctgactttctccctcgctagggacgctccggcgcccgaaaggaaagggtggcgctgcgctccggggtgcacgagccgacagcgcccgaccccaacgggccggccccgccagcgccgctaccgccctgcccccgggcgagcgggatgggcgggagtggagtggcgggtggagggtggagacgtcctggcccccgccccgcgtgcacccccaggggaggccgagcccgccgcccggccccgcgcaggccccgcccgggactcccctgcggtccaggccgcgccccgggctccgcgccagccaatgagcgccgcccggccgggcgtgcccccgcgccccaagcataaaccctggcgcgctcgcgggccggcactcttctggtccccacagactcagagagaacccaccatggtgctgtctcctgccgacaagaccaacgtcaaggccgcctggggtaaggtcggcgcgcacgctggcgagtatggtgcggaggccctggagaggtgaggctccctcccctgctccgacccgggctcctcgcccgcccggacccacaggccaccctcaaccgtcctggccccggacccaaaccccacccctcactctgcttctccccgcaggatgttcctgtccttccccaccaccaagacctacttcccgcacttcgacctgagccacggctctgcccaggttaagggccacggcaagaaggtggccgacgcgctgaccaacgccgtggcgcacgtggacgacatgcccaacgcgctgtccgccctgagcgacctgcacgcgcacaagcttcgggtggacccggtcaacttcaaggtgagcggcgggccgggagcgatctgggtcgaggggcgagatggcgccttcctctcagggcagaggatcacgcgggttgcgggaggtgtagcgcaggcggcggctgcgggcctgggccgcactgaccctcttctctgcacagctcctaagccactgcctgctggtgaccctggccgcccacctccccgccgagttcacccctgcggtgcacgcctccctggacaagttcctggcttctgtgagcaccgtgctgacctccaaataccgttaagctggagcctcggtagccgttcctcctgcccgctgggcctcccaacgggccctcctcccctccttgcaccggcccttcctggtctttgaataaagtctgagtgggcagcagcctgtgtgtgcctgggttctctctatcccggaatgtgccaacaatggaggtgtttacctgtctcagaccaaggacctctctgcagctgcatggggctggggagggagaactgcagggagtatgggaggggaagctgaggtgggcctgctcaagagaaggtgctgaaccatcccctgtcctgagaggtgccaggcctgcaggcagtggctcagaagctggggaggagagaggcatccagggttctactcagggagtcccagcatcgccaccctcctttgaaatctccctggttgaacccagttaacatacgctctccatcaaaacaaaacgaaacaaaacaaactagcaaaataggctgtccccagtgcaagtgcaggtgccagaacatttctctcattcccaccccttcctgccagagggtaggtggctggagtgagggtgctggccctactcacacttcctgtgtcacggtgaccctctgagagcagcccagtcagtggggaaggaggaaggggctgggatgctcacagccggcagcccacacctggggagactcttcagcagagcaccttgcggccttactcctgcacgtctcctgcagtttgtaaggtgcattcagaactcactgtgtgcccagccctgagctcccagctaattgccccacccagggcctctgggacctcctggtcttctgcttcctgtgctgccagcaacttctggaaacgtccctgtccccggtgctgaagtcctggaatccatgctgggaagttgcacagcccatctggctctcagccagcctaggaacatgagcagcacttccaacccagtccctgccccacagcaagcctccccctccacactcacagtactggattgagctttggggagggtggagaggaccctgtcactgctttccttctggacatggacctctctgaattgttggggagttccctcccctctccaccacccgctcttcctgcgcctcacagcccagagcattgttatttcagcagaaacactttaaaaaataaactaaaatccgacaggcacggtggctcacgcctgtaatcccagcactttgggaggccgaggtgggaggatcacctgaggtcgggagtttgagaccaccctgatcaacatgtagaaaccccatctatactaaaaatacaaaatcagccgggcatggtggcccatgcctgtaaacccacctactccggaggctgaggcaggagaatcattttaaccaaggaggcagaggttgcagtgagctaagatcacaccattgcactccagcctggaaaacaacagcgaaactccgcctcaaaaaaaaaaaagcccccacatcttatcttttttttttccttcaggctgtgggcagagtcagaagagggtggcagacagggaggggaaatgagaagatccaacgggggaagcattgctaagctggtcggagctacttccttctctgcccaaggcagcttaccctggcttgctcctggacacccagggcagggcctgagtaagggcctggggagacagggcagggagcaggctgaagggtgctgacctgatgcactcctcaaagcaagatcttctgccagacccccaggaaatgacttatcagtgatttctcaggctgttttctcctcagtaccatccccccaaaaaacatcacttttcatgcacagggatgcacccactggcactcctgcacctcccacccttccccagaagtccaccccttccttcctcaccctgcaggagctggccagcctcatcaccccaacatctccccacctccattctccaaccacagggcccttgtctcctctgtcctttcccctccccgagccaagcctcctccctcctccacctcctccacctaatacatatccttaagtctcacctcctccaggaagccctcagactaaccctggtcaccttgaatgcctcgtccacacctccagacttcctcagggcctgtgatgaggtctgcacctctgtgtgtacttgtgtgatggttagaggactgcctacctcccagaggaggttgaatgctccagccggttccagctattgctttgtttacctgtttaaccagtatttacctagcaagtcttccatcagatagcatttggagagctgggggtgtcacagtgaaccacgacctctaggccagtgggagagtcagtcacacaaactgtgagtccatgacttggggcttagccagcacccaccaccccacgcgccaccccacaaccccgggtagaggagtctgaatctggagccgcccccagcccagccccgtgctttttgcgtcctggtgtttattccttcccggtgcctgtcactcaagcacactagtgactatcgccagagggaaagggagctgcaggaagcgaggctggagagcaggaggggctctgcgcagaaattcttttgagttcctatgggccagggcgtccgggtgcgcgcattcctctccgccccaggattgggcgaagcctcccggctcgcactcgctcgcccgtgtgttccccgatcccgctggagtcgatgcgcgtccagcgcgtgccaggccggggcgggggtgcgggctgactttctccctcgctagggacgctccggcgcccgaaaggaaagggtggcgctgcgctccggggtgcacgagccgacagcgcccgaccccaacgggccggccccgccagcgccgctaccgccctgcccccgggcgagcgggatgggcgggagtggagtggcgggtggagggtggagacgtcctggcccccgccccgcgtgcacccccaggggaggccgagcccgccgcccggccccgcgcaggccccgcccgggactcccctgcggtccaggccgcgccccgggctccgcgccagccaatgagcgccgcccggccgggcgtgcccccgcgccccaagcataaaccctggcgcgctcgcggcccggcactcttctggtccccacagactcagagagaacccaccatggtgctgtctcctgccgacaagaccaacgtcaaggccgcctggggtaaggtcggcgcgcacgctggcgagtatggtgcggaggccctggagaggtgaggctccctcccctgctccgacccgggctcctcgcccgcccggacccacaggccaccctcaaccgtcctggccccggacccaaaccccacccctcactctgcttctccccgcaggatgttcctgtccttccccaccaccaagacctacttcccgcacttcgacctgagccacggctctgcccaggttaagggccacggcaagaaggtggccgacgcgctgaccaacgccgtggcgcacgtggacgacatgcccaacgcgctgtccgccctgagcgacctgcacgcgcacaagcttcgggtggacccggtcaacttcaaggtgagcggcgggccgggagcgatctgggtcgaggggcgagatggcgccttcctcgcagggcagaggatcacgcgggttgcgggaggtgtagcgcaggcggcggctgcgggcctgggccctcggccccactgaccctcttctctgcacagctcctaagccactgcctgctggtgaccctggccgcccacctccccgccgagttcacccctgcggtgcacgcctccctggacaagttcctggcttctgtgagcaccgtgctgacctccaaataccgttaagctggagcctcggtggccatgcttcttgccccttgggcctccccccagcccctcctccccttcctgcacccgtacccccgtggtctttgaataaagtctgagtgggcggcagcctgtgtgtgcctgagttttttccctcagcaaacgtgccaggcatgggcgtggacagcagctgggacacacatggctagaacctctctgcagctggatagggtaggaaaaggcaggggcgggaggaggggatggaggagggaaagtggagccaccgcgaagtccagctggaaaaacgctggaccctagagtgctttgaggatgcatttgctctttcccgagttttattcccagacttttcagattcaatgcaggtttgctgaaataatgaatttatccatctttacgtttctgggcactcttgtgccaagaactggctggctttctgcctgggacgtcactggtttcccagaggtcctcccacatatgggtggtgggtaggtcagagaagtcccactccagcatggctgcattgatcccccatcgttcccactagtctccgtaaaacctcccagatacaggcacagtctagatgaaatcaggggtgcggggtgcaactgcaggccccaggcaattcaataggggctctactttcacccccaggtcaccccagaatgctcacacaccagacactgacgccctggggctgtcaagatcaggcgtttgtctctgggcccagctcagggcccagctcagcacccactcagctcccctgaggctggggagcctgtcccattgcgactggagaggagagcggggccacagaggcctggctagaaggtcccttctccctggtgtgtgttttctctctgctgagcaggcttgcagtgcctggggtatcagagggagggttcccggagctggtagccataaagccctggccctcaactgataggaatatcttttattccctgagcccatgaatcacccttggtaaacacctatggcaggccctctgcctgcgtttgtgatgtccttcccgcagcctgtgggtacagtatcaactgtcaggaagacggtgtcttcgttatttcatcaggaagaatggaggtctgacctaaaggtagaaatatgtcaaatgtacagcagagggctggttggagtgcagcgctttttacaattaattgatcagaaccagttataaatttatcatttccttctccactcctgctgcttcagttgactaagcctaagaaaaaattataaaaattggccgggcgcggtggctcacacctgtaattgcagcactttgccaggcttaggcaggtggatcacctgaagtcaggggttcgagaccagcctagccaacatagtgaaaccctgtctctactaaaaagacaaaaattgtccaggtgtgatgactcatgcctgtaaacctggcactttgggaggcggaggttgtagtgagtcaagatcgcgccatcgcactccagcttgggcaacaagagcgaaactctgtctcaaaaaaaaatttaatctaatttaatttaatttaaaaattagcacggtggttgggcacagtggctcacgcctgtaatcccagcactttgggaagccaaggtgggcagatcacaaggtcaggaattcgagaccagcctggccaatatggggaaaccccatctctactaaaaatacaaaaaattagccgggtgtggtggcgcacgcctgtaatcccagctactcgggaggttgaggtaggagaatcacttgaacccaggaggcagaggttgcagtgacccgagatcacaccattgcactctagcctgggcaacaagagcaaaactccatctcaaaaaaaattataaaaattatacatcagtagatgaatgggtaaacaaaatgtggtggtctatacacacaatggaatattatttggccacaaaaagaaatgaagcactgataggatgtagctgcaccctgaaaatatttgacaagtaaaagaagccggacaccaaaggtcacaaactgcatgaccccatctatatgcaatatccgctacagccaaatccatagggaccaaaagcggattagtggctgccggggccagagttactgttaatgagtaccgaggtggcgtttgggatgatgaaaaagttctgacctagatagtggtgatggctgcataacactaagtgttcttaatatcaccaaattttatacctgaaaaatggctacaatggtaatttatgtctattttatcaccttttttaaaacaaaaaagatataaggggtacagcagagtgagtgctgcatatgcatttactattattcttgggttacatcccaggtactcaataaatgttcactgccctgaagaaacacctgctacgagtcaggcacctcacagttgttatccgtttaattctcacaatctgagaagaaactgtcaccctcattttatataataaatgagaaaacagactcgggcaagtgtcacaatagaatcaagaggcagaataaactgacttccaatgccaaatccatgccgaaattcagtgctataataatgtacatggccgggcgcggtggttcacgcctgtaatcccagaactttgggaggctgaggcgggaggatcacctgaggtcgggagtttgagatcagcctaacacggtgaaaccctgtctctactaaaaatacaaaattggcatggtggcatgcacctgtgatcccagttactcgggaggctgaggcaggagaatcgtttgaacccgggaggcggaggttgcagtgagccggaatggcgccactgcactcaccgcacccggccaatttttgtgtttttagtagagactaaataccatatagtgaacacctaagacggggggccttggatccagggcgattcagagggccccggtcggagctgtcggagattgagcgcgcgcggtcccgggatctccgacgaggccctggacccccgggcggcgaagctgcggcgcggcgccccctggaggccgcgggacccctggccggtccgcgcaggcgcagcggggtcgcagggcgcggcgggttccagcgcggggatggcgctgtccgcggaggaccgggcgctggtgcgcgccctgtggaagaagctgggcagcaacgtcggcgtctacacgacagaggccctggaaaggtgcggcaggctgggcgcccccgcccccaggggccctccctccccaagccccccggacgcgcctcacccacgttcctctcgcaggaccttcctggctttccccgccacgaagacctacttctcccacctggacctgagccccggctcctcacaagtcagagcccacggccagaaggtggcggacgcgctgagcctcgccgtggagcgcctggacgacctaccccacgcgctgtccgcgctgagccacctgcacgcgtgccagctgcgagtggacccggccagcttccaggtgagcggctgccgtgctgggcccctgtccccgggagggccccggcggggtgggtgcggggggcgtgcggggcgggtgcaggcgagtgagccttgagcgctcgccgcagctcctgggccactgcctgctggtaaccctcgcccggcactaccccggagacttcagccccgcgctgcaggcgtcgctggacaagttcctgagccacgttatctcggcgctggtttccgagtaccgctgaactgtgggtgggtggccgcgggatccccaggcgaccttccccgtgtttgagtaaagcctctcccaggagcagccttcttgccgtgctctctcgaggtcaggacgcgagaggaaggcgccgcccctccccaaggaaaggcgagggcctggggcacacccccagtgcccagatccaggcgcgcctctttccacctccagcaggtttggggcctcggccatgggggcaccgaactgcgtgcagcctgaccctcccgaatggggtggtaggtgagggccgcgggacgccccgggcggcgggctgcgaggacggccgactctgcccatcccgagggcggctggcttcgccctccccactctgcgccgagcacgcggcccggacccaccgcgagaactccgcacctgcagcgtgaacgcacgcgggcggcgttaagggcccggggctgactcggagcaggttagggaacagcgccccctcccggcgcgagccggtacctgcgcagcacccagccgccgcggctgtggcctggaatcggggacctggggtgccggggggttgtggtgaaggaggtgggaccagccccagcacctagccacgtagctggcgaggtggaccaggaaccgacccagacccctgccgtcacccgacatcactacggagagtgaagcttttttatatttgtccacataaaaccaatcatggtcattgtagaacttccgaaaacaaggcttgctgcaccttcctgtgtatcccaggtccaggaatgggtgcagcacatccttcagctgccgcttgacacgcggcaaactgtgtcatgtgtaaacaagaacaggacatggctgtcatatccaagagcacatgtgtaacacagacatgccacacacacacacacacacacacggggtagaggcaggcctcatccacacccctaacatttgatgcgtagctgttccagtcttctaggcacatgtagagatgcttttcctcagaaatggtattctcaaggtgacactgaggaaaagtggacaggccgggcgcggtggctcacgcctgtaatcccagcactccgggaggccgaggcgggcggatc

SEQ ID NO: 293 - DNA, 4268 bp, Homo sapiens
cccaaggaccactcttctgcgtttggagttgctccccacaaccccgggctcgtcgctttctccatcccgacccacgcggggcgcggggacaacacaggtcgcggaggagcgttgccattcaagtgactgcagcagcagcggcagcgcctcggttcctgagcccaccgcaggctgaaggcattgcgcgtagtccatgcccgtagaggaagtgtgcagatgggattaacgtccacatggagatatggaagaggaccggggattggtaccgtaaccatggtcagctggggtcgtttcatctgcctggtcgtggtcaccatggcaaccttgtccctggcccggccctccttcagtttagttgaggataccacattagagccagaagagccaccaaccaaataccaaatctctcaaccagaagtgtacgtggctgcgccaggggagtcgctagaggtgcgctgcctgttgaaagatgccgccgtgatcagttggactaaggatggggtgcacttggggcccaacaataggacagtgcttattggggagtacttgcagataaagggcgccacgcctagagactccggcctctatgcttgtactgccagtaggactgtagacagtgaaacttggtacttcatggtgaatgtcacagatgccatctcatccggagatgatgaggatgacaccgatggtgcggaagattttgtcagtgagaacagtaacaacaagagagcaccatactggaccaacacagaaaagatggaaaagcggctccatgctgtgcctgcggccaacactgtcaagtttcgctgcccagccggggggaacccaatgccaaccatgcggtggctgaaaaacgggaaggagtttaagcaggagcatcgcattggaggctacaaggtacgaaaccagcactggagcctcattatggaaagtgtggtcccatctgacaagggaaattatacctgtgtggtggagaatgaatacgggtccatcaatcacacgtaccacctggatgttgtggagcgatcgcctcaccggcccatcctccaagccggactgccggcaaatgcctccacagtggtcggaggagacgtagagtttgtctgcaaggtttacagtgatgcccagccccacatccagtggatcaagcacgtggaaaagaacggcagtaaatacgggcccgacgggctgccctacctcaaggttctcaaggccgccggtgttaacaccacggacaaagagattgaggttctctatattcggaatgtaacttttgaggacgctggggaatatacgtgcttggcgggtaattctattgggatatcctttcactctgcatggttgacagttctgccagcgcctggaagagaaaaggagattacagcttccccagactacctggagatagccatttactgcataggggtcttcttaatcgcctgtatggtggtaacagtcatcctgtgccgaatgaagaacacgaccaagaagccagacttcagcagccagccggctgtgcacaagctgaccaaacgtatccccctgcggagacaggtaacagtttcggctgagtccagctcctccatgaactccaacaccccgctggtgaggataacaacacgcctctcttcaacggcagacacccccatgctggcaggggtctccgagtatgaacttccagaggacccaaaatgggagtttccaagagataagctgacactgggcaagcccctgggagaaggttgctttgggcaagtggtcatggcggaagcagtgggaattgacaaagacaagcccaaggaggcggtcaccgtggccgtgaagatgttgaaagatgatgccacagagaaagacctttctgatctggtgtcagagatggagatgatgaagatgattgggaaacacaagaatatcataaatcttcttggagcctgcacacaggatgggcctctctatgtcatagttgagtatgcctctaaaggcaacctccgagaatacctccgagcccggaggccacccgggatggagtactcctatgacattaaccgtgttcctgaggagcagatgaccttcaaggacttggtgtcatgcacctaccagctggccagaggcatggagtacttggcttcccaaaaatgtattcatcgagatttagcagccagaaatgttttggtaacagaaaacaatgtgatgaaaatagcagactttggactcgccagagatatcaacaatatagactattacaaaaagaccaccaatgggcggcttccagtcaagtggatggctccagaagccctgtttgatagagtatacactcatcagagtgatgtctggtccttcggggtgttaatgtgggagatcttcactttagggggctcgccctacccagggattcccgtggaggaactttttaagctgctgaaggaaggacacagaatggataagccagccaactgcaccaacgaactgtacatgatgatgagggactgttggcatgcagtgccctcccagagaccaacgttcaagcagttggtagaagacttggatcgaattctcactctcacaaccaatgaggaatacttggacctcagccaacctctcgaacagtattcacctagttaccctgacacaagaagttcttgttcttcaggagatgattctgttttttctccagaccccatgccttacgaaccatgccttcctcagtatccacacataaacggcagtgttaaaacatgaatgactgtgtctgcctgtccccaaacaggacagcactgggaacctagctacactgagcagggagaccatgcctcccagagcttgttgtctccacttgtatatatggatcagaggagtaaataattggaaaagtaatcagcatatgtgtaaagatttatacagttgaaaacttgtaatcttccccaggaggagaagaaggtttctggagcagtggactgccacaagccaccatgtaacccctctcacctgccgtgcgttctggctgtggaccagtaggactcaaggtggacgtgcgttctgccttccttgttaattttgtaataattggagaagatttatgtcagcacacacttacagagcacaaatgcagtatataggtgctggatgtatgtaaatatattcaaattatgtataaatatatattatatatttacaaggagttattttttgtattgattttaaatggatgtcccaatgcacctagaaaattggtctctctttttttaatagctatttgctaaatgctgttcttacacataatttcttaattttcaccgagcagaggtggaaaaatacttttgctttcagggaaaatggtataacgttaatttattaataaattggtaatatacaaaacaattaatcatttatagttttttttgtaatttaagtggcatttctatgcaggcagcacagcagactagttaatctattgcttggacttaactagttatcagatcctttgaaaagagaatatttacaatatatgactaatttggggaaaatgaagttttgatttatttgtgtttaaatgctgctgtcagacgattgttcttagacctcctaaatgccccatattaaaagaactcattcataggaaggtgtttcattttggtgtgcaaccctgtcattacgtcaacgcaacgtctaactggacttcccaagataaatggtaccagcgtcctcttaaaagatgccttaatccattccttgaggacagaccttagttgaaatgatagcagaatgtgcttctctctggcagctggccttctgcttctgagttgcacattaatcagattagcctgattctcttcagtgaattttgataatggcttccagactctttgcgttggagacgcctgttaggatcttcaagtcccatcatagaaaattgaaacacagagttgttctgctgatagttttggggatacgtccatctttttaagggattgctttcatctaattctggcaggacctcaccaaaagatccagcctcatacctacatcagacaaaatatcgccgttgttccttctgtactaaagtattgtgttttgctttggaaacacccactcactttgcaatagccgtgcaagatgaatgcagattacactgatcttatgtgttacaaaattggagaaagtatttaataaaacctgttaatttttatactgacaataaaaatgtttctacagatattaatgttaacaagacaaaataaatgtcacgcaacttaaaaaaaaaaaaaaaa

SEQ ID NO: 294 - DNA, 1356 bp, Homo sapiens
ttctcccgcaaccttcccttcgctccctcccgtcccccccagctcctagcctccgactccctccccccctcacgcccgccctctcgccttcgccgaaccaaagtggattaattacacgctttctgtttctctccgtgctgttctctcccgctgtgcgcctgcccgcctctcgctgtcctctctccccctcgccctctcttcggcccccccctttcacgttcactctgtctctcccactatctctgcccccctctatccttgatacaacagctgacctcatttcccgataccttttcccccccgaaaagtacaacatctggcccgccccagcccgaagacagcccgtcctccctggacaatcagacgaattctccccccccccccaaaaaaaaaagccatccccccgctctgccccgtcgcacattcggcccccgcgactcggccagagcggcgctggcagaggagtgtccggcaggagggccaacgcccgctgttcggtttgcgacacgcagcagggaggtgggcggcagcgtcgccggcttccagacaccaatgggaatcccaatggggaagtcgatgctggtgcttctcaccttcttggccttcgcctcgtgctgcattgctgcttaccgccccagtgagaccctgtgcggcggggagctggtggacaccctccagttcgtctgtggggaccgcggcttctacttcagcaggcccgcaagccgtgtgagccgtcgcagccgtggcatcgttgaggagtgctgtttccgcagctgtgacctggccctcctggagacgtactgtgctacccccgccaagtccgagagggacgtgtcgacccctccgaccgtgcttccggacaacttccccagataccccgtgggcaagttcttccaatatgacacctggaagcagtccacccagcgcctgcgcaggggcctgcctgccctcctgcgtgcccgccggggtcacgtgctcgccaaggagctcgaggcgttcagggaggccaaacgtcaccgtcccctgattgctctacccacccaagaccccgcccacgggggcgcccccccagagatggccagcaatcggaagtgagcaaaactgccgcaagtctgcagcccggcgccaccatcctgcagcctcctcctgaccacggacgtttccatcaggttccatcccgaaaatctctcggttccacgtccccctggggcttctcctgacccagtccccgtgccccgcctccccgaaacaggctactctcctcggccccctccatcgggctgaggaagcacagcagcatcttcaaacatgtacaaaatcgattggctttaaacacccttcacataccctcccccc

SEQ ID NO: 295 - DNA, 2660 bp, Homo sapiens
cacgagaagacaggaggaagaaagggagagagggccaggcagtcgcactgtgaacagaacaggagaaggcgaagcggggcaaagttccctgcccaccgacgccagcctgcttggatgacttgcctcgtttcataattcacttactgtctgcaccagccggcctcagcctggctggaccctgctgcctgtgtggcccggagccagaggcccccacactcccagctgctcttctacagatgccatcaacgagcaggactctgggtggctccactgtctaagcctggagagtcaccgccgagggatgaggacgcgccagcccgggggaacgcgccagctgctttcgcggccccaagcgcgcagtgcccagcagccgcgccgagcctgacacgctgtcctctcccctcgcgcacagggctctgcgagtgacccggcgggcgagctccgtgctgcatggaacggctgcagaagcaaccacttacctcccccgggagcgtgagcccctcccgagattccagtgtgcctggctctccctccagcatcgtggccaagatggacaatcaggtgctgggctacaaggacctggctgccatccccaaggacaaggccatcctggacatcgagcggcccgacctcatgatctacgagcctcacttcacttattccctcctggaacacgtggagctgcctcgccagcgcgagcgctcgctgtcacccaaatccacatcccccccaccatccccagaggtgtgggcggacagccggtcgcctggaatcatctctcaggcctcggcccccagaaccactggaaccccccggaccagcctgccccatttccaccaccctgagacctcccgcccagattccaacatctacaagaagcctcccatctataagcagagagagtccgtgggaggcagccctcagaccaagcacctcatcgaggatctcatcatcgagtcatccaagtttcctgcagcccagcccccagaccccaaccagccagccaaaatcgaaaccgactactggccatgccccccgtctctggctgttgtggagacagaatggaggaagcggaaggcgtctcggaggggagcagaggaagaggaggaggaggaagatgacgactctggagaggagatgaaggctctcagggagcgtcagagagaggaactcagtaaggttacttccaacttgggaaagatgatcttgaaagaagagatggaaaagtcattgccgatccgaaggaaaacccgctctctgcctgaccggacacccttccatacctccttgcaccagggaacgtctaaatcttcctctctcccccgctatggcaggaccaccctgagccggctacagtccacggagttcagcccatcagggagtgagactggaagcccaggcctgcagatctatccctatgaagtgctagtggtgaccaacaaggggcgaaccaagctgccaccgggggtggatcggatgcggcttgagaggcatctgtctgccgaggacttctcaagggtatctgccatgtcccctgaagagtttggcaagctggctctgtggaagcggaatgagctcaagaagaaggcctctctcttctgatggcccccacctgctccgggacggcccccttacccctgctgcttcagggtttttccccggcgggttgggaggggcaggaggtggggtggaaatagggtgggctcctttcctcaggtagagtggggggccaaaacctctgcagtccccggcagtgagctatggactttcttccccctcacgaggctgggggcctcctgctctcgtccctggccctccctgtacagggcaaagccagtctgggctctggcacacagagttcatgtttgccgccctctccctgcccctcaccccagaggtgagaggaatgaggggcattggtggttaggccggttggctgtcttgaacagctggagggaagatgcaggggtgggaagcggccaggcagaaagagctccaggctcttgtgtcgcccacccagccctcccatactcactcctgacagctttcctgcactgcagcttcctgctcctctgactctagtgggaacaggccccagctcagcctccgcgagggaggtcacccctccacttcagcttgccctgacctccgctcgcaaaccccgagcttccaagccttttgctccagccctgcggcttccccagaagcctgggcttagggtggagatgccgcctacccgatcctggccctccacctgcctccaggccacgaaatgggaattccagcactaagccaggcaccgggcagaagctgggccttccgcctcccttggatggggtcaagaggccaggcctggcacattttggagtgtcctggctaccagctctcacacctacacccacgcaccccctcacacactatgctctctcaagaatgtaatttattggggcccccccagctgctttcctcacctgcccctgccctaccttacacccccagcttgacttctttccagtccacgtggatataatgatatctatatttttgcccaggtctgggtattgctcctgcccagaccctgacatccctttccactgtgtgtgtgaccatgctgggggagggggactctgcttggaattaaaaggttgctttgggtccct

SEQ ID NO: 296 - DNA, 402 bp, Homo sapiens
gtgaactgagccacccactcccaaacaggaaaccctggtgaaggttcaggaagcacggagattctctccaacaaaggtccagttaggaaacgacgctgagaggatgacgacaacgtgcaacagcagaaagatgcttgcaagcagagtcagggtcaccagtgaatgccacaaaagttctctttcccactgtttaatttgacaagagaagaatttgaaggatatgaacattttcaagaactctgctgaggtcacttagagcgccatcacaacttatttgtgtgactaattgcctagattgtaagctctttgagggcagggcttgtctcttacacatctttataatcccctgcagcggctttcagtattttgtacttgtaggcacctaataaatttattatttgc

SEQ ID NO: 297 - DNA, 459 bp, Homo sapiens
  misc_feature: n=a,t,g or c
aaattactaaaagatgcaattcaaagataggtcccagtttaacactgaattgcttgacttctgtggcttttctttttctggccacatttatttatttaagcaatttttgtatgccttgttatttcatttccatagagattatattgtatcagtgtttatgtaagctggaatcatcctcagttttttgctgataatttttcaaataaagatacatggataattgtaaaatacactaactcttagggtgttgtagtagctgaaacatggagatgcgtantgtcatgctttttctgaatggacaggagaaacataagctacggagtaattcacttctgaggatgcttttccggaaaaagaaaggctagaaaatactccgcacttcctccagaaccctctttcctggtaacgggtatcctttgttggtgtgttttgctcntacattacagatagactaaccat

SEQ ID NO: 298 - DNA, 466 bp, Homo sapiens
gtccagtgccaaaaattttagagtttgagaaggtcacagaaatcctctagttggtgcctccacagtcttcaattttacagaggaactcagggctaatggagttaatgcaactagatcagggttttgggtctgtgttctttctaccgtcagcacctgtgtggtcaattctggacacttcccagagaagtctttgagtagagaatcctactcaaatttcactgtatattttaagcattcctctcctttccctttgcctcccctgttgccttttcttcccctgatttctcctctggtcatctcctctcccttctgcgtgtaagccatgggaaagggatgagggaggacagcttctggttaaacacaggtccctcttccacatcaaatgaacattggcttcctgggacagaaggccttcaaaggagggattgcaaagcaaggcaaagcgttctgtcttcattttccccat

SEQ ID NO: 299 - DNA, 622 bp, Homo sapiens
  misc_feature: n=a,t,g or c
ctcctcccttccttcaggcctcttagcattgtttgttttcccatttctgatactactactccatgctgaagatttgccatattactattttggaaacattgagtgatagaactcctagaaaatttgcaaagaaatgttacatactgtatatcaaactctcagattctagtgttgaaaaagtagcctatactttgctattacttatacctgctgccatagaaaaaaataagtttattcatgacacatttacatttgatcataaataaaagaaaaaagggcacctttttggagttagtcatggtagtcattagtgatatttctgaacagttcttaatttaaaatacttcaaaggaagtaaaggtcatggcttagctgaaggaaatgctccagaaattggactgtgtaaaccatcagtacaataatacgctgtgtatgtatgtgtatataaatgagaattatgggcatattggagcattgcattaatccacaaactcncattgagacaaaccttagtttacagctgtctgattaaagccagtggtccagttgctgtgaagaatagccccttcaaatacttggaaagtggtacctggaacctgtaaggattcntttaaatttaacc

SEQ ID NO: 300 - DNA, 103 bp, Homo sapiens
cagctcacgcgggacctggccggcctcccgagtctcttcaagcagctgcccagcccgcccttcctgccggccgccgggacagcagactgccggtaacgcgcgg

SEQ ID NO: 301 - DNA, 442 bp, Homo sapiens
ggcgctgcagaatgctccactgccagccggccccctgcctcggttcccttctgtttagtggcgacacaggcacccagctttggggtggtgctgacgctcccaggggtgccaggagccactgggacagggtgaggctcccagacgctcctcgaggtgcccagctctccagggagcttctggcccaaggccgtctgagggatctgctccttaaccccccagtgccttggcgagggcaggttccaagccacagacgcctgccctgagtggactctgcggccagtccctggtgccctcctggccctgctgcccagtgagggctcctacgggtgggttcattggcctgggccagcaagcccccacctgcattgaccttaggcccatagagagggctgtcccggtgctgccccagccaggatctggtcgctgccccaggggactgatg

SEQ ID NO: 302 - DNA, 340 bp, Homo sapiens
  misc_feature: n=a,t,g or c
attcggcacgagtttcaaagaaaatagattaggtttgcgggggtctgagtctatgttcaaagactgtgaacagcttgctgtcacttcttcacctcttccactccttctctcactgtgttactgctttgcaaagacccgggagctggcggggaaccctgggagtagctagtttgctttttncgtacacagagaaggctatgtaaacaaaccacagcaggatcgaagggtttttagagaatgtgtttcaaaaccatgcctggtattttcaaccataaaagaagtttcagttgtccttaaatttgtataacggtttaattctgtcttgttcatttgagtattt

SEQ ID NO: 303 - DNA, 493 bp, Homo sapiens
tgcgctcattggcagacttatgtttcaggcatgttgagatttggaaaagtggatgtaactgaaattcagatagctttagtgattgtctttgtgttgtctgcatttggaggagcaacaatgtgggactatacgattcctattctagaaataaaattgaagatccttccagttcttggatttctaggtggagtaatattttcctgttcaaattatttccatgttatcctccatggtggtgttggcaagaatggatccactatagcaggcaccagtgtcttgtcacctggactccacataggactaattattatactggcaataatgatctataaaaagtcagcaactgatgtgtttgaaaagcatccttgtctttatatcctaatgtttggatgtgtctttgctaaagtctcacaaaaattagtggtagctcacatgaccaaaagtgaactatatcttcaagacactgtctttttggggccaggcttttgttttt

SEQ ID NO: 304 - DNA, 437 bp, Homo sapiens
atttcacctactatttctgaatatattttgcaaattgaattggaataggaattgatatagcagtcttaaacattagtagtgggatttggctatggtccagactgtgctccttatagagaatttgatctgctcagtgtgagcggtttgctgttagccagggctatttatggcaaacacatgcttttgtatcttgtcatagttatccacaaatggcaaaactggacttgattctactggtatgcaaaacaggcatgctagtaagcagtcagtcgtggctcagaacttaaccccatagctcagaggaatgcttttagcagaaaacaggaaagaaaatatcccttaaaatttttttttgaatgtgtggaagtaattttagtataattagattttttccatatttttgaaagatttttcagatgtgaacattaaaataggga

SEQ ID NO: 305 - DNA, 444 bp, Homo sapiens
tagctctaggtgtgcccctgaatcagttcatggtagattatgctgaacaacagtgagatgttattggaggtgtggatgagggagtttgttgttgcagtccttctttgcaccttattttaaagaataaatgaaacatttttctggttacttttttaaaaatttaaaatggaagggaagaataggggcagggcattattaggctatttctgatgcttcagtgttataaattcaacatagaggctgacaacctaaattcatggtgtaacacagctcttttccttttcctttttttttttttttttggtatctgttcaatgaaaataaggtatgacccaagtttttacctagtctgactagaagtattccacttcaaggtctgaagtaggacttttaccttaaaaaacaacaacaaacaaaactatcacacaggatagataagaagat

SEQ ID NO: 306 - DNA, 335 bp, Homo sapiens
tccctccctgggcccggcctggacccgtcaggtgcctgtccccagcaccaaccccactcatgccccatcgtcctcccagacaaatgaaaccacgctgcgcttccgatgcccccgctagccgtgtaatggttcagctaatcccatggcgagatgggggctcactccggaggagagccaggcagcagggccttcctgaccaacagccagctctgtccttccccccaggaaacacatgttcatttgtgtgatcatgtatagacctcagaacggaagataggactgtatataattgtaataaataccagttgccactaaaaaaaaaaaaaaaaaaaacc

SEQ ID NO: 307 - DNA, 7621 bp, Homo sapiens
gctcctcggacctcatctcttccccagggaagaagggggccgctcatcctgaccccagcaagacctctgtagacacagggaaagtcagtcggccagagaatcccagccagcctgcatcgcccagggtcgccaagtgcaaggccaggtctccagtcaggctcccccatgagggcagcccctccccaggggagaaagcagcggctccccctgactacagcaagactcgatcagcatcggaaaccagcacaccccacaataccaggagggtggctgccctcaggggagcgggacctggagcagagggaatgacaccagctggtgctgtcctgccaggagaccccctcacatcccaggagcagagacagggagctccaggtaaccacagtaaggctctggaaatgacaggaatccatgcacctgaaagctcccaggagccttccctgctggagggagcagattctgtgtcctcaagggcaccgcaggccagcctctccatgctgccatccactgacaacaccaaagaagcatgtggccatgtctcggggcactgctgcccgggggggagtagagagagccctgtgacggacattgacagcttcatcaaggagctggatgcttctgcagcaaggtctccgtcttcccagacgggggacagtggctctcaggagggcagtgctcagggccacccaccagccggggctggaggtgggagctcctgccgtgccgaaccagtcccggggggccagacctcctccccgaggagggcctgggctgctggtgcccccgcctacccacaatgggcctcccagccttcggttttagattcaattaatcccgacaaacattttactgtgaacaaaaactttctgagcaactactctagaaattttagcagttttcatgaagacagcacctccctatcaggcctgggtgacagcacggagccgtctctgtcatccatgtatggcgatgctgaggattcttcttctgaccctgagtcactcactgaagccccacgagcttctgccagggacggctggtcccctcctcgttcccgtgtgtctttgcacaaggaagatccttcggagtcagaagaggaacagattgagatttgttccacacgtggctgccccaatccaccctcgagtcctgctcatcttcccacccaggctgccatctgtcctgcctcagccaaagttctgtcattaaaatacagcactccgagagagtcggtggccagtccccgtgagaaggtcgcctgcttgccaggctcatacacttcaggcccagactcttcccagccatcatcactcttggagatgagctctcaggagcatgaaactcatgcggacataagcacttcacagaaccacaggccctcgtgtgcagaagaaaccacagaagtcaccagcgctagctcagccatggaaaacagtccgctgtctaaagtagccaggcattttcacagtccgcccatcattctcagctcccccaacatggtaaatggcttggaacatgacctgctagatgacgaaaccctgaatcaatacgaaacaagcattaatgcagctgccagtctgtcctccttcagtgtggatgtccctaagaatggagaatctgttttggaaaacctccacatctctgaaagtcaagacctggatgacttgctacagaaaccaaaaatgatcgctaggaggcccatcatggcctggtttaaagaaataaataaacataaccaaggcacacatttgaggagcaaaaccgagaaggaacaacctctaatgcctgccagaagtcccgactccaagattcagatggtgagttcaagccaaaaaaagggcgttactgtgcctcatagccctcctcagccgaaaacaaacctggaaaataaggacctgtctaagaagagtccggcagaaatgcttctgactaatggtcagaaggcaaagtgtggtccgaagctgaagaggctcagcctcaagggcaaggccaaagtcaactctgaggcccctgctgcgaatgctgtgaaggctggggggacggaccacaggaaacccttgatctcaccccagacctcccacaaaacactttctaaggcagtgtcacagcggctccatgtagccgaccacgaggaccctgacagaaacaccacagctgcccccaggtccccccagtgtgtgctggaaagcaagccacctcttgccacctctgggccactgaaaccctcagtgtctgacacgagcatcaggacatttgtctcgcccctgacctctcccaagcctgttcctgagcaaggcatgtggagcaggttccacatggctgtcctctctgaacccgacagaggttgcccaaccacccctaaatctcctaagtgtagagcagagggcagggcgccccgtgctgactccgggccggtgagtccggcagcgtctaggaacggcatgtccgtggcagggaacagacagagtgagccgcgcctggccagccatgtggcagcagacacagcccaacccaggccgactggcgaaaaaggaggcaacataatggccagcgatcgcctcgaaagaacaaaccagctgaaaatcgtggagatttctgctgaagcagtgtcagagactgtatgtggtaacaagccagctgaaagcgacagacggggagggtgcttggcccagggcaactgtcaggagaagagtgaaatcaggctctatcgccaggtcgcagaatcatccacaagtcatccatcctcactcccatctcatgcctcccaggcagagcaggaaatgtcacgatcattcagcatggcaaaactggcgtcctcctcctcctcccttcaaacagccattagaaaggcagaatactcccagggaaaatcaagcctgatgtcagactcccgaggggtgcccagaaacagcattccagggggcccctcgggggaggaccatctctacttcaccccaaggccagcgaccaggacctactccatgccagcccagttctcaagccattttggacgggagggtcaccccccacacagcctgggtcgctctcgggacagccaggtccctgtgacaagcagtgttgtccccgaggcaaaggcatccagaggtggtcttcccagcctggctaatggacagggcatatatagtgtaaagccgctgctggacacatcgaggaatcttccagccacagatgaaggggatatcatttcagtccaggagacgagctgcctagtcacagacaaaatcaaagtcaccagacgacactactgctatgagcagaactggccccatgaatctacctcatttttctctgtgaagcagcggatcaagtcttttgagaacctggccaatgctgaccggcctgtagccaagtccggggcttccccatttttgtcggtgagctccaagcctcccattgggaggcggtcttccggcagcattgtttccgggagcctgggccacccaggtgacgcagcagcaaggttgttgagacgcagcttgagttcctgcagcgaaaaccaaagcgaagccggcaccctcctgccccagatggccaagtctccctcaatcatgacactgaccatctctcggcagaacccaccagagaccagtagcaagggctctgattcggaactaaagaaatcacttggtcctttgggaattcccaccccaacgatgaccctggcttctcctgttaagaggaacaagtcctcggtacgccacacgcagccctcgcccgtgtcccgctccaagctccaggagctgagagccttgagcatgcctgaccttgacaagctctgcagcgaggattactcagcagggccgagcgccgtgctcttcaaaactgagctggagatcacccccaggaggtcacctggccctcctgctggaggcgtttcgtgtcccgagaagggcgggaacagggcctgtccaggaggaagtggccctaaaaccagtgctgctgagacacccagttcagccagtgatacgggtgaagctgcccaggatctgccttttagaagaagctggtcagttaatttggatcaacttctagtctcagcgggggaccagcaaagattacagtctgttttatcgtcagtgggatcgaaatctaccatcctaactctcattcaggaagcgaaagcacaatcagagaatgaagaagatgtttgcttcatagtcttgaatagaaaagaaggctcaggtctgggattcagtgtggcaggagggacagatgtggagccaaaatcaatcacggtccacagggtgttttctcagggggcggcttctcaggaagggactatgaaccgaggggatttccttctgtcagtcaacggcgcctcactggctggcttagcccacgggaatgtcctgaaggttctgcaccaggcacagctgcacaaagatgccctcgtggtcatcaagaaagggatggatcagcccaggccctctgcccggcaggagcctcccacagccaatgggaagggtttgctgtccagaaagaccatccccctggagcctggcattgggagaagtgtggctgtacacgatgctctgtgtgttgaagtgctgaagacctcggctgggctgggactgagtctggatgggggaaaatcatcggtgacgggagatgggcccttggtcattaaaagagtgtacaaaggtggtgcggctgaacaagctggaataatagaagctggagatgaaattcttgctattaatgggaaacctctggttgggctcatgcactttgatgcctggaatattatgaagtctgtcccagaaggacctgtgcagttattaattagaaagcataggaattcttcatgaattttaacaagaatcattttctcagttctcttctttctttagcaaatcagagtgacttctttaaaccacaggttgttgaaatggccaacactggtacagacacggactataaaaatctccaagcttgtgcttacacatgaagcctgacttaactgtatgtgcaacagcaatgaaattaactccagaagccttccacctgcgtcacccaggccgggagggttccttcgttccagtgcctgtcccctacctttatgttatgtttactgatggggatacaagatgtgacacacccttctttatttgaaacaaacaaacatttagctagacctttgcttccttcttgccagctctcccaacatacccaatcctggtgatcagggaactaaaagtctgagggggacacaaatgtcacacctaagaggacaatcaatcattttgtatgattttgtaagtaagtaaatgacagaatgcttttaggcacattcaatggaaggaggagatgtaggtctgtatatgttaccctgaaaagagaataagacttacttaaaaaaatgaattatgacctgttaggctgagctcaggaattgtccaaaaaggaaaaagcaaaataattaattgagagtattttttagtgagtgtaatgtataatgtacgtatgcaaagttcaactcaataggttattgatcaccatgaagtattgatcattttctatctcaaaagtgtaagccataaggctgttttacagaatagcacttctgataagctgtattaaatagccatgagcttcactgcttagagggagcagaaaggtcaacatctaaaagcaccttacaactagtttttgaacctgtcttgataagtgcttgaattcaagactggtcagtacaagagcagacaaaaatatcacaagtcagtcactgggtttccatttctgaattttatgcactccaaccatgaatttaaactaaatttttagaaatcaagtatctttctaagtgtccttggatttatagacaatgtatgtacaatccaaatagaggagcttaatggaatccttttaggagactggttggtttttttccctctttcccaacatgtttaagaaatgtaacattctaagtattggatctcttttcttgacctagtataatgacaactgcagtgacttaagtttttgctgttttcgttttcccgctttgcaatttcctccttttgccaaaaatgttttcctacagaagactgtcgtgactcacgctacttgggaaactcactctggccactcctcctctggtggcatgagctgcttcccagtagctattccgattggatattccgttcgtcgtcacatagctggcttttctctcctcatgatgtaccttattttcttaggtaaataattccaaactctcatcgggtcataaagaggaggagaaacagggtgagtcaaggtaaaggagcagaaatgtagttacaagccaggtcgtcttcagtggcacaaaccaacccgttgagccctgacaacatgagtggagagtgcatttgccatacctgtgtgcatgacactaagattttatgttggagatacttctttaaataacctacagcttgggtctatggctgtgacccccagattcatggaggggctttagccatcagctttgtacatcatcatttttctgaatgaccaatcccactaaacatctttgaagtcggcctagagaggtccttcagatgagagagaaatagctggcttgtctgagtccagatttctcatcaactggcaatacaaaggaaaatatggtacaggagttagttagaaaggtcttattgattttacttctacttttcactacagttacaggtagaatactgtaggaagtcagtgcaaggtgcatgcttgattgatagatattgattgtttttcagtctctggggtcagttttgtggtttctgctttcttgcctaaatcaaagactatttcaagtcaacaacactgaaaactgcttttcgcctccactcttacagctgtgcctaataataattaattaataaacgcacagccctatgtgaacagacaggaatttcttgtgcaatgtggagcaaatggaatggtctccttccgcaagtctttttaatcctcatatctggagtacaagggtagacctctggcttaccacatacactatgctaaagtcatcagccactgctactacatcttgccagaaggtttccctcgccaacaaacagttgaaatttaagggaagaagcaaaagctaaactgtctttgaccctaagatagatagaaagctatttatttgtcttcagtgttcaaggcatgactagtatttctaattagcctaataaattcccacactttctgaagtgaacactaatggtattgtcctactaaaactgtcattgtttctttttttttaactggtcagtcattcacaataagctatgagggtaaataaatatgtgttataacaagtaaaccgtagttgcaagaatataccatgaagattaaagtaggctgggtttcatttccatcttcccacacatctcattgaatttgatggttgacttaattggcaccataactttgtatgatattatacattaacctttatttatgtaaagtaaaatgccttatatattaaagagtaagtgcaataatatgaaatagcctgtacattttaaaaatgttgtcaccaagttatataaatccacatctctgtaaacaaccttttttaagtaattttaaaaaaaataaacactctgcttactacttg

SEQ ID NO: 308 - DNA, 6452 bp, Homo sapiens
ggaagaaagtaaaaactcaaacaagctcatttgatatacaaaaagcagaatggcttcgaaaatataatcccgagcagctccttcaagatgaaggctacaaaaaacatataaaacaccactgtaataaggttttgcttcgtgtgagaatgctgtattatctaaagcaagaagttattggaaatgagtgtcagaaagtatttgatggagttgatgcaagtgacattgatgtttgggtaccagaaccagaccactcagaagttcctgctgagtggtgggattttgatgctgataagtcactccttattggagtttttaaacatggatatgaaaaatataacactattcgagcagacccagcattatgcttcttggaaagagtgggaaaacctgatgagaaagcagttgctgctgaacagagagcgaatgattatatggatggggatgtggaagatccagaatacaaacctgccccagccatctttaaagatgatatagaggatgatgtttcctcaccaggagatcttgttatagcagatggagatggtcaactgatggagggtgataaagtatattggcctactcaatcagctttaaccacacgtttgaggcgtctcatcactgcataccagcgtactaataaaaacagacaaattcaacagatacaaccgactttctcggtgcctaccagtgtaatgcagcctatttatgaggaagccactcttaatcctaaaatggcagccaagatagaaagacagcaaagatggacaagaagagaagaagctgacttttatagggttgtatctacatttggagtggtttttgaccctgacagaggccaatttgattggacaaaatttagagctatggctaggctacataagaaaactgatgatagtttggaaaaatatttgtacgcattcatgtccatgtgtcggagggtttgtcgtcttccttccaaagaagaattggtggatccaaatatttttatccagcccatcacagaagaacgtgcttctaggactttgtatcgcattgaacttctaaggaaagtacgggaacaggcccttcgacatccacagttgtttgaacgcttgaagctttgccatccaaatccagatttaccagtctggtgggaatgtggccctcatgatagggatttgcttattggtgctgccaaacacggggtgagccgaacagactatcacattcttcgtgatcctgaactctcatttatggcagctcagaggaactacagtcaaagtaagatggctcattcaaggacttctaccccacttctacagcaatatcaagtagcactttctgcttctcctcttacctctctacctaggctcctagatgctaaaggtattattctagaggagatgaaagttaaaagtgaaaaccttaaagaggagcctcagtcttctgaagaagaatctatgtcttctgtggaaaccaggacactgataaaatctgagcctgtaagtccaaagaatggtgttttaccacaggctactggagaccagaaatctggtggaaaatgtgaaacagacagacgcatggttgcagccagaacagaacccctaactccaaacccagcttctaagaaaccaagagtccacaaaaggggatcagaatctagttctgattctgactcagattctgagagatcatcttgttcttccagatcatcttcttcctcatcatcctcttcttgctcccactctcgatcaggctctagttcttcttcatcttcatcttgttcttcagcatcttcttcatcctcttcctccacctcttcctcctcctcctcctcttcatcttcatcagaagaaagtgacagtgatgaagaagaagcccaaaaacgagaaagtactactcacatgaaagcctatgatgaagaaagcgtcgcgtcactgagcactacccaggatgagactcaggatagttttcagatgaacaatgggacaccagagtctgcttatatcttacaaggtggatatatgctggcagcctcgtattggccaaaggatcgtgtgatgatcaataggttggacagtatttgtcaaacagttctgaaaggaaagtggccttcagctagaagaagttatgatgctaacacagtggcttctttctataccacaaaactgctggacagccctggagcagctacagaatacagcgagcccagtgtacccactcccccaggtgccggtgttaaagaagaacatgatcagtcaacacagatgtcaaaggaaggtggtttgaagttgacatttcagaagcaagggcttgctcagaaaagaccatttgatggtgaagacggtgctctggggcagcagcagtacctcactcggcttcgagagcttcaaagtgcatcagagaccagcctcgtcaatttcccaaaatccataccagtatcaggtacttccattcaaccaacccttggtgccaatggtgtgatattagacaaccagcctatagtcaaaaaaaggcgaggaaggaggaagaatgtagaaggtgttgacatcttcttttttaacagaaataaaccacctaatcatgtttctttaggcttaacctcctcacagatttccacagggataaatccagcactatcctatactcaacctcaaggaattcctgatacagaaagtccagttccagttattaatcttaaagatggaacgagacttgcaggagatgatgcaccaaagagaaaggatttggaaaaatggcttaaggagcacccgggttatgtggaagatttgggagcttttattcctagaatgcagcttcatgagggaagacccaaacaaaaaagacaccgttgcagaaaccccaataaactagatgtgaatagtctcactggagaagaacgtgttcaactgattaacagaagaaatgctagaaaggttggaggtgcatttgctccccctttgaaagatttatgtagattcctaaaagaaaattcagaatatggagtagctcctgaatggggagatgttgttaagcaatctggatttcttccagaaagcatgtatgaacgtattctcactggtcccgttgtgagagaggaagtaagcaggcgggggagacggcctaaaagtggaattgcaaaggccacagcagcagcagctgctgcatctgccaccagtgtttcaggcaatcctttgttagccaatggactacttccaggtgtggatctcacaactcttcaggccttacaacaaaacctacaaaacttgcagtcactgcaagtaactgctgggttgatgggaatgcctaccggccttccttctggaggagaagctaaaaacatggctgctatgttccccatgctgctgtcaggaatggctggattaccaaatctgttgggcatgggaggactcctgacaaagcctacggaatctgggacagaagacaaaaagggaagtgactctaaggagtcagaaggaaaaacagaaaggacagagagccaaagttcagagaatggtggagaaaactctgtgtcaagttctccttccgcatcctctactgctgcattaaatacagctgcagctgccaacccattagctcttaacccactattactatctaatatactttatccagggatgcttctcactccaggccttaatcttcatattccaactttgtcccagtccaatacttttgatgtacaaaacaaaaacagtgacttaggctcgtctaagtctgtagaagtaaaagaagaagattccagaattaaagatcaggaagacaaaggaggaactgaaccaagtcctctcaatgaaaacagcacagatgagggttcagagaaagctgatgcttcatctggatctgatagtacatcgtcgtcatctgaggattcagattctagtaatgaagactgattcccagactctgcacttaaaatatgaactgattttggattttttctttaataattaattgtaaataccccagtgttgagtgcatcaataacttactgaccgaacatttcagttatttgtttagaagtgcaaactgctttcagagactttttgcatgtaatatttcttaagattcataagtttctgaactcgtatgtactatcaaatacataaaggtgtaaaattacaacaaaaggcattataattttgttgggggttaattttatgaaaattatgctcaataagagttgtatatttaatatatttgcagtgaacacagaatactttatgcatattactgatttaatttgaatatagttttacagcctccttgacacctataatttacagatcaaaactcagcaataatttgggcagctaatgaatgtcatgaaagctgtagaatctacatcaccatccattgctttaattacatgaaaatgctctagtgttgtgatgcactgctgatgtttccaattcaggtacaagtatgttttaaagaagaaataagtttcccaatcagccaatttaactggctacctgttacctcagctgagttagtttaggaagtttacattcgtttctaattctatacttgttttcaggggttttttaaacacatcctatatatcatgtcaatctggcaagaaatatgacttgctttttgctgagcttaattcagatatcagtaaaattaagtcataaaataatcatgtgtcatgtgactttggcaccctatagacatacttagttttaacttttcaaagtttggcctcctattagaaataatcatgtctcagatgagtaatgtctgtttccagggttcagaaaaggcaaactcatgaaatgccactgaaaagaactttcaacacagcatacttcatgtaaaagaaattgtttgtttgctttctttgtgtagatttctatttgtgttttatgtcatggaaatattccagaattaacagataatagtggtaaagtaatatgcagatagtctaaattcattttgagtttctaggtgtaagcagactaaatgttgcccagaatcagtgttgggttatcagtttatattaaatatactgagttgcccgttttgaaaatgcactttgaataatctcaaaaagatgtacaagttatacctgtaaaccacaaaagtgaagcctgaggcttctgttcaatttcatagactcctttaccatgtaaaatttgtctgatatttgatttgtgatacaatttctcctgctaaagctgctattattctgacaaggtagaggtccaggttcacctttatatatatttaaaacaattagtactgaattggacataaaaatattgacattctaaggagagatatatgttagcatttttctggtactcaaataagttagtagtaaagtctgcaagggcataaatttagggggaaaaagtgtcccagttctctcctacagaaaaaatactttcagtatgttttgataaaactgttgctttgtcatgagttagtcaattgtatcaggttttccaagacctttaccagtaaattatgtttctgtatgtaaaataaccccttattagagagacagtgttatatgtatttacaaaattatataagttccattgggattgtattgattttgtattttcccaaaatagtactttgaattgatagtcctttatgcaatgtcttagcaatagtctctataatgcccatccaggagaagtgggtagtaattcttcatcatgaaaatgatatattacatatttagtatcttccctttgcagtattgcacttttgtttaactagaatacacctatgagatagccaaagtttcaaacacagttatcttagtttaccggtggagtatttcaacaccaaccacatttcccttcctccctctaattctacccacatgatctttattccttcctttcgccaattaaaaaaaaaaaaaaggaaaaaaaatctgtagatcttgtcactaaaatctaatttatatcaaatttatgagagaaagtattttcctaattatggtcaaataaatttggttaacatcctagtgattctctttctatataataaggcaattacagttttcaaagcattaagtctaacataactttaaacattctcttaggtttcaagacacttctatttaatattcattggggaaaagttgtccagctatcagctaagaaaacacatgcaaatatggttgtgtaaagttaagggttataaggaaaaaaaaatcagtagaattacataatactaaagttgcagttgaaagaatatccaagtatgtgttggtagttactaaaagaattatagctgttattgccttgtatttatagcccttgtttcaggttttatgattcaagtcttagtccaatctttcttttggacatttgcaatatttaccagttgtgttttgtgtagtctgaatttgctttctgtagttgagcaaacgtcttaaaaagtcatttgtaatttattaaattactttctatgatgttctatagagc

SEQ ID NO: 309 - DNA, 5432 bp, Homo sapiens
gcaagaccaaggtggctgtgctggagatcctgggtgctgtgtgcctcgtgcctggtggccacaagaaggtgctgcaggccatgctgcactaccaggtgtatgcagcagagcgaacccgcttccagaccctgctgaacgagctagaccgaagtctgggccggtaccgggatgaagtgaatctgaaaacagccatcatgtccttcatcaatgctgtcctcaatgctggagctggagaggataatctggagttccgcctacatctacggtatgaattcctgatgctgggtatacagcctgtgattgacaagctccggcaacatgaaaatgccatcctggacaaacatttagacttcttcgagatggtgcggaatgaggatgacctggagctagccaggaggtttgacatggtccacatcgacaccaagagtgcttcccagatgtttgagttgatccacaagaagctgaagtacacggaggcctacccctgcctgctctctgtgctgcaccactgcctgcagatgccctacaaacggaacggtggctacttccagcagtggcagctcctggaccgcatcctccagcagattgtcctccaggatgagcggggtgtggaccctgacctggctcccttggagaacttcaatgtcaagaacatcgtcaacatgctcatcaacgagaatgaagtgaaacagtggcgagaccaggcagagaagttccggaaagaacacatggagcttgtgagccgtctggagaggaaggagcgggaatgcgagacaaagacattggagaaggaagagatgatgcggacgctgaacaaaatgaaggacaagctggcccgggagtcccaggagctgcgccaggctcggggacaagtggcagagctggtagcccagctcagtgaactctcaacaggccctgtatcttccccaccaccccctgggggcccactcaccttgtcttcctcaatgacaaccaatgacctgcctccaccccctcctcctctgccctttgcctgttgtccccctcccccaccaccaccccttcctcccgggggacccccgactcccccaggtgccccaccttgcctcggcatgggcctgcccctccctcaggacccctaccccagcagtgacgtcccactcaggaaaaagcgtgtcccccagccttctcacccactgaagtccttcaactgggtgaagctgaatgaggagcgtgtccctggcaccgtatggaatgagattgatgacatgcaggtatttcggatcctggacctagaggattttgaaaaaatgttttcagcctaccagaggcaccaggagctgataactaatccttctcagcagaaagagctgggctccactgaagacatatacctggcttcccgcaaggtcaaagagctgtcggtcattgatggccggagggcccaaaactgcatcatccttctttccaagttgaagctttctaacgaggagatccggcaggccatcttgaagatggatgagcaggaggaccttgctaaggacatgctggagcagctcctcaagttcatcccagagaagagtgacattgacctcctggaggagcacaagcatgaaattgagcggatggcccgtgctgaccgcttcctctatgaaatgagcaggattgaccactaccagcagcgactgcaagccctcttcttcaagaagaaattccaggagcggctggctgaggcaaagcccaaagtggaagccatcctgttggcctcccgggagctggtccgcagcaagcgtcttagacagatgctagaggtcatcctagccataggcaacttcatgaacaaagggcagcgtgggggcgcctacgggttccgggtggccagcctcaacaagatcgctgacaccaagtccagcatcgacagaaacatctctctgctccattacctgatcatgatcctggagaagcattttcctgatattctaaacatgccttcagagctgcaacatcttccagaagccgccaaagtcaacctagcagaactggagaaggaggtgggcaacctcaggaggggcctgagagcggtggaggtggagctggagtatcagaggcgccaggtacgggagcccagtgacaagtttgtccctgtcatgagcgacttcatcacggtgtccagcttcagcttctccgagctggaggaccagctaaatgaggccagggacaagttcgccaaggccttgatgcacttcggggagcatgacagcaagatgcagccagacgaattctttggcatctttgataccttcttgcaggccttctcagaggcccggcaggatctagaggccatgaggaggaggaaggaggaggaggagcggcgggcgcgcatggaagccatgctgaaggagcagagggaacgtgagcggtggcagcggcagcggaaggtcctggctgcaggcagctcgctggaggagggaggagagttcgatgacctggtgtcggccctgcgctctggggaggtcttcgacaaggacttatgcaagctcaagcgcagccgcaagcgatcagggagccaggccctggaagttacccgggagcgggcaataaaccggctaaattattgacctggggaactagccacacaggaggccgggagacagggactggtgagaatggggctgagtggaggaggtggtgatatttaaaccatttggtgcttggtttagagccttgggctgggtcctgggatggggggctgtgtgtggctggaccaggtgtctccccacgcttaccttaaggggctcctcttatctccccttcacatgattccttctgtgccctggccccaggtattattctgaggctgccttggatggcctcaggccaggtaaccccaggctgaaggggccctgctccccatcccctaccatgggcacccatgtgctggcacagaacagttccagatctagactggagaggtccacagccttgtccagagttcctgtgtagcacggggagcaatgatggagggagcccctgagagggaatctggtgagggaatccagactcccttctctcaaggggaggctcaacagaacattgacctgggggcaaactttcctcttgaatgggaacagaggaggcattatatattctagttagatcagctctggtaggttccagagaacagtcaatgttggaaggatgatgcagggaccaaagccatcaggacagagtagcagtgtctgtttcccatgtcacaagtcctctggcctctccctgcatgtcttaagtatctttcccttccttctctaccctcacctccatcctgtctactaatccacagtcctagaagactcaccttgggtttccacagctatggctcactaccaggtgcttgatgaatctggcgaggggctcaagacagacctcatgcatcaccacacctcatgccttttgggcatctcccatgtccccatctcctggacacctggccattgttgtgaagccagacagtgacctcaaatgttgccttggagtcccctacagcccctcagcagagggcagcacttgaatgcttagctccatcccatagttctctacttcatataaattgctcaggccctcccaccccttctctaacactagcttcaaggcagaagccacagcagcctctgtccagcctgcaggtggccacttggaaccatgtgtccactggcgttggggagttggttcctgagaggtctgagggccagagctgccctctacattaacatgctgtctctaagggtggcccctcctctcaggcgttcagatggtgcgaacagcagagcaggcaagggaaactggggagatggggatggaggaggaaggctgatatcctctggggagcacatcacctgaaggtgccaaggaggaaggctgagaggggggccaccccatttctggtacccaatttggttcttcagcccaacttgcaaggggttccttctggtcctcccatccactgccaccttccattttgtccatctcatgctggccttggtggatgggatggctgtatctagacaaaatttttctaaaactccatcaaggctcttattcaataccacgttccgagttggcctttcatcttctttgagactggccctgcctaacctctaccatcaatgagctcttggcccttctgcccttccctgtgtttctcactttccaacctaatccctggctcagggttattgccagtggagactggtgagctgggcctactctcagctgcctatcttctgcctttcacttgcatccaactcctggggctgggaccgtagtagctgcggtgggggagaaacacagggtcggtgagcccagcatgtgcgttggtttgagggggcgggcggtgtgtgtgtgttctggtgggagggatctgagcaagtgcaagcctggctgacacaggtgtgaagaggccatcctggaacccaggtgagggcaagatgaaggcttccaggcagaacagctgcagagagtttggctatatgcatctgcagccccaagagctcccactgcaagacaagtgttggggaagatgggaggttgtgggtgaggcctctaaaggtcctctcccaaactgaccaggctgatgtcaacctaaccccctcaggggcagggaacaggggagggctccacaagcgtgtctggcattcccacccaccatggaagactggatacgcacctggaaacaaaaggactatggaagctgttcaagatacatttgatcttcagaaaagcagaatttggttcaactgttgacagaggacacaaatacgttgttccagagctcagccttctcactctaaaagaaagatatttttctatttattttctacatctggccagtggctctggtgctagatgccactgtagccagatctccaacagtgccttggaccatggactcatactcaactgagtaagaaggggctggtgcccagtcggggtggctgagctggtccttaataggttgtttcttggtcttgctttcttcatgccctccccactgctcctgccacctttagataagtttctctagctaattttgtggccaatgtaaaattcgtcatcaacctaacaaacacaaccttctcagcagcatttctcccctgtgatggaaataaataaagtgtttagggcagtgggaggagaaaattctccaggtgaatggggaagggtctgttccagcctctccctactcccatcccatttccaccaactggggaactgtgactatctatctcccccgacttctaccagggatgccttcaagccaaggctgttctcaccagctgcctcagatgacaaatgaggctaatggacataatctacagtgtcctttttcacttgcaccttttttataagaatatattgtaatactaaaaaatattaaattcataccatccctaccc

SEQ ID NO: 310 - DNA, 482 bp, Homo sapiens
aaaatatctcattaaaaagcccataaataataggggagaagaaagccttaggtatcaattccaaaacagtgattgaaatttcccaaaataattatggcttctgtcatctccagagataatctggcttggtttaccccataatctaatttcagaaaagaaagctttattttaacactcatctgaatcaacattaaagccttttctctcaaagcgtttattgagaaactcaaatgaatatactttttgaattactgtcatcaaaagtgtacggcttcctgtgctgcttgtgtcaaatggaacctgccctctaaagcactttctttcctttacttgcgtggtttcatgtaagctgtgctgtttagaacaacatctcagactttacaaagaatgacaagaaggcaattgcactttttagggatatcgccaagcagtttctgttttctaaaggccaaaatacagagtgtgtgtcatttttattagat

SEQ ID NO: 311 - DNA, 429 bp, Homo sapiens
gttcagagagattttcattgggtgcattctctctgcttcgtgtgtgacaagttatcttggctgctgagaaagagtgccctgccccacaccggcagacctttccttcacctcatcagtatgattcagtttctcttatcaattggactctcccaggttccacagaacagtaatattttttgacaataggtacaatagaaggtcttctgtcatttaacctggtaaaggcagggctggagggggaaaataaatcattaagcctttgagtaacggcagaatatatggctgtagatccatttttaatggttcatttcctttatggtcatataactgcacagctgaagatgaaaggggaaaataaatgaaaattttacttttcgatgccaatgatacattgcactaacctgatgggagaggttatccaaagtactg

SEQ ID NO: 312 - DNA, 379 bp, Homo sapiens
  misc_feature: n=a,t,g or c
ttagcagttcanatagtttattcagcaatataacaggagagaacctccattgtaagagacataaggcagatacagggtgcatctctggggtacattcttcatacagactaacaaataacttcaggtttcacaacatgtagcaagtatgatttgttgcacaccaacagccattcattcctcacgttttccttgctaaaagagccctggtcaggcacggtggctatgctgtaatcccagcactgtcggaggtcagggcaggtggatcatctgaggtcaggagttcaagaccagcctggggcaacatggtgaaaccccgtctctactaaaaacacaaaattttgccagacatggtgggcggggcacctgttaattccccact

SEQ ID NO: 313 - DNA, 411 bp, Homo sapiens
  misc_feature: n=a,t,g or c
tatccttggatgtacaaaaaattcagaaaatgatctctgtagatattctgttttattttggtcatctttagaagttatcaggaatgtgtttaaaacaagaagagaacttttctaaggaatgatacatagaaaagattttattttaaaatgagttgtaaagcttgtgtttctttgttgctgcaagctatctgcccaagttaatgcaaatggacacattttttatgtcagaaaaacacacacacacacacacacacacacacacacacacgaaaaacaaaggaaaaaaatgcttgagctttttctaacttccccttgcagtctgttgtgtgagcagcctgtttatttcntctaatattatgtcagtttattctctttaatgggantgttaaaaaatgttattcacaggagtgc

SEQ ID NO: 314 - DNA, 458 bp, Homo sapiens
  misc_feature: n=a,t,g or c
ggagtttcaccatgttggccaggctggtctcaaactcctgacctcaggtgatccacctgcctcagcctcccaaagtgctgggattacaggcatgagtcattgctcccagccattagaaagattgttaatcctatgaactcccttttgtaggagagaaagggccaatctgtaggggtagccctgtccaggtaaagttgttttcagcctcatgtctactgttaggtgagggagtcacagccagacagagagtattgctggagggtgagagaattgtggagaccaactaccacatagcaagagcccagctcttgggagcattgagatgtaagctcagggttacacagttccaaatcttggggaaggggctttttcagacagactgtttgctttctgctgagattaaggaattgcatcantctgccagagtattgactttttaacagattattaaataaagg

SEQ ID NO: 315 - DNA, 5433 bp, Homo sapiens
atgggatggctgtggatctttggggcagccctggggcagtgtctgggctacagttcacagcagcaaagggtgccatttcttcagcctcccggtcaaagtcaactgcaagcgagttatgtggagtttagacccagccagggttgtagccctggatactatcgggatcataaaggcttgtataccggacggtgtgttccctgcaattgcaacggacattcaaatcaatgccaggatggctcaggcatatgtgttaactgtcagcacaacaccgcgggagagcactgtgaacgctgccaggagggctactatggcaacgccgtccacggatcctgcagggcctgcccatgtcctcacactaacagctttgccactggctgtgtggtgaatgggggagacgtgcggtgctcctgcaaagctgggtacacaggaacacagtgtgaaaggtgtgcaccgggatatttcgggaatccccagaaattcggaggtagctgccaaccatgcagttgtaacagcaatggccagctgggcagctgtcatcccctgactggagactgcataaaccaagaacccaaagatagcagccctgcagaagaatgtgatgattgcgacagctgtgtgatgaccctcctgaacgacctggccaccatgggcgagcagctccgcctggtcaagtctcagctgcagggcctgagtgccagcgcagggcttctggagcagatgaggcacatggagacccaggccaaggacctgaggaatcagttgctcaactaccgttctgccatttcaaatcatggatcaaaaatagaaggcctggaaagagaactgactgatttgaatcaagaatttgagactttgcaagaaaaggctcaagtaaattccagaaaagcacaaacattaaacaacaatgttaatcgggcaacacaaagcgcaaaagaactggatgtgaagattaaaaatgtcatccggaatgtgcacattcttttaaagcagatctctgggacagatggagagggaaacaacgtgccttcaggtgacttttccagagagtgggctgaagcccagcgcatgatgagggaactgcggaacaggaactttggaaagcacctcagagaagcagaagctgataaaagggagtcgcagctcttgctgaaccggataaggacctggcagaaaacccaccagggggagaacaatgggcttgctaacagtatccgggattctttaaatgaatacgaagccaaactcagtgaccttcgtgctcggctgcaggaggcagctgcccaagccaagcaggcaaatggcttgaaccaagaaaacgagagagctttgggagccattcagagacaagtgaaagaaataaattccctgcagagtgatttcaccaagtatctaaccactgcagactcatctttgttgcaaaccaacattgcgctgcagctgatggagaaaagccagaaggaatatgaaaaattagctgccagtttaaatgaagcaagacaagaactaagtgacaaagtaagagaactttccagatctgctggcaaaacatcccttgtggaggaggcagaaaagcacgcgcggtccttacaagagctggcaaagcagctggaagagatcaagagaaacgccagcggggatgagctggtgcgctgtgctgtggatgccgccaccgcctacgagaacatcctcaatgccatcaaagcggccgaggacgcagccaacagggctgccagtgcatctgaatctgccctccagacagtgataaaggaagatctgccaagaaaagctaaaaccctgagttccaacagtgataaactgttaaatgaagccaagatgacacaaaagaagctaaagcaagaagtcagtccagctctcaacaacctacagcaaaccctgaatattgtgacagttcagaaagaagtgatagacaccaatctcacaactctccgagatggtcttcatgggatacagagaggtgatattgatgctatgatcagtagtgcaaagagcatggtcagaaaggccaacgacatcacagatgaggttctggatgggctcaaccccatccagacagatgtggaaagaattaaggacacctatgggaggacacagaacgaagacttcaaaaaggctctgactgatgcagataactcggtgaataagttaaccaacaaactacctgatctttggcgcaagattgaaagtatcaaccaacagctgttgcccttgggaaacatctctgacaacatggacagaatacgagaactaattcagcaggccagagatgctgccagtaaggttgctgtccccatgaggttcaatggtaaatctggagtcgaagtccgactgccaaatgacctggaagatttgaaaggatatacatctctgtccttgtttctccaaaggcccaactcaagagaaaatgggggtactgagaatatgtttgtgatgtaccttggaaataaagatgcctcccgggactacatcggcatggcagttgtggatggccagctcacctgtgtctacaacctgggggaccgtgaggctgaactccaagtggaccagatcttgaccaagagtgagactaaggaggcagttatggatcgggtgaaatttcagagaatttatcagtttgcaaggcttaattacaccaaaggagccacatccagtaaaccagaaacacccggagtctatgacatggatggtagaaatagcaatacactccttaatttggatcctgaaaatgttgtattttatgttggaggttacccacctgattttaaacttcccagtcgactaagtttccctccatacaaaggttgtattgaattagatgacctcaatgaaaatgttctgagcttgtacaacttcaaaaaaacattcaatctcaacacaactgaagtggagccttgtagaaggaggaaggaagagtcagacaaaaattattttgaaggtacgggctatgctcgagttccaactcaaccacatgctcccatcccaacctttggacagacaattcagaccaccgtggatagaggcttgctgttctttgcagaaaacggggatcgcttcatatctctaaatatagaagatggcaagctcatggtgagatacaaactgaattcagagctaccaaaagagagaggagttggagacgccataaacaacggcagagaccattcgattcagatcaaaattggaaaactccaaaagcgtatgtggataaatgtggacgttcaaaacactataattgatggtgaagtatttgatttcagcacatattatctgggaggaattccaattgcaatcagggaaagatttaacatttctacgcctgctttccgaggctgcatgaaaaatttgaagaaaaccagtggtgtcgttagattgaatgatactgtgggagtaaccaaaaagtgctcggaagactggaagcttgtgcgatctgcctcattctccagaggaggacaattgagtttcactgatttgggcttaccacctactgaccacctccaggcctcatttggatttcagacctttcaacccagtggcatattattagatcatcagacatggacaaggaacctgcaggtcactctggaagatggttacattgaattgagcaccagcgatagcggcggcccaatttttaaatctccacagacgtatatggatggtttactgcattatgtatctgtaataagcgacaactctggactacggcttctcatcgatgaccagcttctgagaaatagcaaaaggctaaaacacatttcaagttcccggcagtctctgcgtctgggcgggagcaattttgagggttgtattagcaatgtttttgtccagaggttatcactgagtcctgaagtcctagatttgaccagtaactctctcaagagagatgtgtccctgggaggctgcagtttaaacaaaccaccttttctaatgttgcttaaaggttctaccaggtttaacaagaccaagacttttcgtatcaaccagctgttgcaggacacaccagtggcctccccaaggagcgtgaaggtgtggcaagatgcttgctcaccacttcccaagacccaggccaatcatggagccctccagtttggggacattcccaccagccacttgctattcaagcttcctcaggagctgctgaaacccaggtcacagtttgctgtggacatgcagacaacatcctccagaggactggtgtttcacacgggcactaagaactcctttatggctctttatctttcaaaaggacgtctggtctttgcactggggacagatgggaaaaaattgaggatcaaaagcaaggagaaatgcaatgatgggaaatggcacacggtggtgtttggccatgatggggaaaaggggcgcttggttgtggatggactgagggcccgggagggaagtttgcctggaaactccaccatcagcatcagagcgccagtttacctgggatcacctccatcagggaaaccaaagagcctccccacaaacagctttgtgggatgcctgaagaactttcagctggattcaaaacccttgtataccccttcttcaagcttcggggtgtcttcctgcttgggtggtcctttggagaaaggcatttatttctctgaagaaggaggtcatgtcgtcttggctcactctgtattgttggggccagaatttaagcttgttttcagcatccgcccaagaagtctcactgggatcctaatacacatcggaagtcagcccgggaagcacttatgtgtttacctggaggcaggaaaggtcacggcctctatggacagtggggcaggtgggacctcaacgtcggtcacaccaaagcagtctctgtgtgatggacagtggcactcggtggcagtcaccataaaacaacacatcctgcacctggaactggacacagacagtagctacacagctggacagatccccttcccacctgccagcactcaagagccactacaccttggaggtgctccagccaatttgacgacactgaggatccctgtgtggaaatcattctttggctgtctgaggaatattcatgtcaatcacatccctgtccctgtcactgaagccttggaagtccaggggcctgtcagtctgaatggttgtcctgaccagtaacccaagcctatttcacagcaaggaaattcaccttcaaaagcactgattacccaatgcacctccctccccagctcgagatcattcttcaattaggacacaaaccagacaggtttaatagcgaatctaattttgaattctgaccatggatacccatcactttggcattcagtgctacatgtgtattttatataaaaatcccatttcttgaagataaaaaaattgttattcaaattgttatgcacagaatgtttttggtaatattaatttccactaaaaaattaaatgtctttt

SEQ ID NO: 316 - DNA, 1486 bp, Homo sapiens
gaattccaaatgcactcaagcagagaagaaatccacaagtactcaccagcctcctggtctgcagagaagacagaatcaatatgagcacagcaggaaaagtaatcaaatgcaaagcagctgtgctatgggagttaaagaaacccttttccattgaggaggtagaggttgcacctcctaaggctcatgaagttcgcattaagatggtggctgcaggaatctgtcgttcagatgagcatgtggttagtggcaacctggtgaccccccttcctgtgattttaggccatgaggcagccggcatcgtggaaagtgttggagaaggggtgactacagtcaaaccaggtgataaagtcatcccgctctttactcctcagtgtggaaaatgcagaatttgtaaaaacccagaaagcaactactgcttgaaaaatgatctaggcaatcctcgggggaccctgcaggatggcaccaggaggttcacctgcagcgggaagcccatccaccacttcgtcggcgtcagcaccttctcccagtacacagtggtggatgagaatgcagtggccaaaattgatgcagcctcgcccctggagaaagtctgcctcattggctgtggattttcgactggttatgggtctgcagtcaaagttgccaaggtcaccccagggtctacctgtgctgtgtttggcctgggaggggtcggcctatctgttgttatgggctgtaaagcagctggagcagccagaatcattgctgtggacatcaacaaggacaaatttgcaaaggctaaagagttgggggccactgaatgcatcaaccctcaagactacaagaaacccattcaggaagtgctaaaggaaatgactgatggaggtgtggatttttcgtttgaagtcatcggtcggcttgacaccatgatggcttccctgttatgttgtcatgaggcatgtggcacaagtgtcattgtaggggtacctcctgattcccagaacctctcaataaaccctatgctgctactgactggacgcacgtggaaaggagctatttttggaggctttaagagtaaagaatctgtcccgaaacttgtggctgactttatggctaagaagttttcactggatgcattaataacaaatattttaccttttgaaaaaataaatgaaggatttgacctgcttcgctctggaaagagtatccgtaccgtcctgacgttttgaaacaatacagatgccttcccttgtagcagttttcagcctcctctaccctacatgatctggagcaacagctaggaaatatcattaattctgctcttcagagatgttaaaaataaattacacgtgggagctttccaaagaaatggaaattgatgggaaattatttgtcaagcaaatgtttaaaatccaaatgagaactaaataaagtgttgaacatcaactggggaattgaagccaataaaccttccttcttaaccattcaaaaaaaaaaaaaggaattc

SEQ ID NO: 317 - DNA, 1421 bp, Homo sapiens
ggcatgcggtgggccctactggtgcttctagctttcctgtctcctgccagtcagaaatcttccaacttggaagggagaacgaagtcagtcaccaggcagactgggtcatctgctgaaatcacttgcgatcttactgtaacaaataccttctacatccactggtacctacaccaggaggggaaggccccacagcgtcttctgtactatgacgtctccactgcaagggatgtgttggaatcaggactcagtccaggaaagtattatactcatacacccaggaggtggagctggatattgagactgcaaaatctaattgaaaatgattctggggtctattactgtgccacctgggacaggcaaaaattattataagaaactctttggcagtggaacaacacttgttgtcacagataaacaacttgatgcagatgtttcccccaagcccactatttttcttccttcaattgctgaaacaaaactccagaaggctggaacatacctttgtcttcttgagaaatttttcccagatattattaagatacattggcaagaaaagaagagcaacacgattctgggatcccaggaggggaacaccatgaagactaacgacacatacatgaaatttagctggttaacggtgccagaagagtcactggacaaagaacacagatgtatcgtcagacatgagaataataaaaacggaattgatcaagaaattatctttcctccaataaagacagatgtcaccacagtggatcccaaagacagttattcaaaagatgcaaatgatgtcatcacaatggatcccaaagacaattggtcaaaagatgcaaatgatacactactgctgcagctcacaaacacctctgcatattacatgtacctcctcctgctcctcaagagtgtggtctattttgccatcatcacctgctgtctgcttggaagaacggctttctgctgcaatggagagaaatcataacagacggtggcacaaggaggccatcttttcctcatcggttattgtccctagaagcgtcttctgaggatctagttgggctttctttctgggtttgggccatttcagttctcatgtgtgtactattctatcattattgtataatggttttcaaaccagtgggcacacagagaacctcagtctgtaataacaatgaggaatagccatggcgatctccagcaccaatctctccatgttttccacagctcctccagccaacccaaatagcgcctgctatagtgtagacagcctgcggcttctagccttgtccctctcttagtgttctttaatcagataactgcctggaagcctttcattttacacgccctgaagcagtcttctttgctagttgaattatgtggtgtgtttttccgtaataagcaaaataaatttaaaaaaatgaaaa

SEQ ID NO: 318 - DNA, 2907 bp, Homo sapiens
ggaaccatggagctcagcgtcctcctcttccttgcactcctcacaggcctcttgctactcctggttcagcgtcaccctaactcccatggcaccctcccaccagggccccgccctctgccccttttggggaaccttctgcagatggacagaagaggcctactcaaatcctttctgaggttccgagagaaatatggggacgtcttcacggtacacctgggaccgaggcccgtggtcatgctgtgtggagtagaggccatacgggaggccctggtggacaacgctgaggccttctctggccggggaaaaatcgtcatcatggacccagtctaccagggatatggcatgctctttgccaatggaaaccgctggaaggtgcttcggcgattctctgtgaccaccatgagggacttcgggatgggaaagcggagtgtggaggagcggattcaggacgaggctcagtgtctgatagaggaacttcggaaatccaagggagccctcgtggaccccaccttcctcttccattccattaccgccaacatcatctgctccatcatctttggaaaacgcttccactaccaagatcaagagttcctgaagacgctgaacttgttctgccagagtttcttactcatcagctctatatccagccagctgtttgagctcttctctggcttcttgaaatactttcctggggcacacaggcaagtttacaaaaacctacaggaaatcaatgcttacattggccacagtgtggagaagcaccgtgaaaccctggaccccagcgcccccagggacctcatcgacacctacctgctccacatggaaaaagagaaatccaacccacacagtgaattcagccaccagaacctcatcatcaacacgctctcgctcttctttgctggcactgagaccaccagcaccactctccgctacggcttcctgctcatgctcaaataccctcatgtcgcagagagagtctacaaggagattgaacaggtggttggcccacatcgccctccagcgcttgatgaccgagccaaaatgccatacacagaggcagtcatccgtgagattcagagatttgctgaccttctccccatgggtgtgccccacattgtcacccaacacaccagcttctgagggtacaccatccccaaggacacggaagtatttctcatcctgagcactgctctccgtgacccacactactttgaaaaaccagacgccttcaatcctgaccactttctggatgccaatggggcactgaaaaagaatgaagcttttatccccttctccttagggaagcggatttgtcttggtgaaggcattgcccgtgcggaattgttcctcttcttcaccaccatcctccagaacttctccgtggccagccccgtggctcctgaagacatcgatctgacaccccaggagtgtggtgtgggcaaaatacccccaacataccagatctgcttcctgccccgctgaaggggctgagggaagggggtcaaaggattccagggtcattcagtgtccccacctctgtagataatggctctgactccctgcaacttcctgcctctgagagacctgctgcaagccagcttccttcccttccatggcaccagttgtctgaggtcgcagtgcaaatgagtggaggagtgagattattgaaaattataatatacaaaattatatatatatattttgagacagagtctcactcagttgcccaggctggagtgcagtggcgtgatctcggctcactgcaacctccacccccggggttcaagaaattctcctgcctcagcctccctagtagctgggattacaggtgtgtgctaccatgcctggctaatttttgtatttttagtagagatggggtttcaccgtgttggccaggctgatctcaaactcctgaactcaagtgattcacccaccttagcctcccaaagtgctgggattacaggtgtgagtcaccatgcccggccatgtatatatataattttaaaaattaagatgaaattcacataaaataaaattagccattttaaagtgtacaatttagtggtgtgtggttcattcacaaagctgtacaaccaccaccatctagttccaaacattttctttttttctgagacggagtctcactctgtcacccaggttcgagttcagtggtcttgaactcctgatgtcaggtgattctcctagttccaaatgttttcattatctctcccccaacaaaacccatacctatcaagctgtcactccccataccccattctctttttcatctcagcccctgtcaatctggtttttgtccttatggacttaccaattctgaatatttcctataaacagaatcacacaatatttgattttttttttaaaactaagccttgctctgtctcccaggctggagtgctgtggcgtgattttggttcactgcaacctccgccttccaagttcaagagattctcctgcctcagcttccaagtagctgggattacaggcatgtggtaccacgcctggctaattttcttgtatttttagtagggacatgttggccaggctggttgtgagctcctggcctcaggtgatccacacgcctcagtgtcccagagtgctgatattacaggcgtaatatgtgatcttttgtgtctggttcctttcacgttgaacgctatttttgaggttcgtgcctgttgtagaccacagtcacacactgctgtagtcttcccccatcctcattcccagctgcctcctcctactgtttccctctatcaaaaagcctccttggcgcaggttccctgagctgtgggattctgcactggtgctttggattccctgatatgttccttcaaatccactgagaattaaataaacatcgctaaagcctgacctccccacgtc

SEQ ID NO: 319 - DNA, 6314 bp, Homo sapiens
gtcggcgaggagggtccggccggagttgaaggattgaactttccggctcagtcgcggcggctgcctggtcctcagcagtgcagccccggcgcggagcagggagcctcggcccgcgcccggcgccctcgccctcgccctcgacccgcagccatggtgcccggggtgcccggcgcggtcctgaccctctgcctctggctggcggcctccagcggctgcctggcggccggccccggcgcggctgctgcgcggcggctggacgagtcgctgtctgccgggagcgtccagcgcgctccgtgcgcctccaggtgcctgagcctgcagatcactcgcatctccgccttcttccagcacttccagaacaatggttccctggtttggtgccagaatcacaagcaatgttctaagtgcctggagccctgcaaggaatcaggggacctgaggaaacaccagtgccaaagcttttgtgagcctctcttccccaagaagagctacgaatgcttgaccagctgtgagttcctcaaatacatcctgttggtgaagcagggggactgtccggctcctgagaaagccagtggatttgcggccgcctgtgttgaaagctgcgaagttgacaatgagtgctctggggtgaagaaatgttgttcgaatgggtgtggacacacctgtcaagtacccaagactctgtacaaaggtgtccccctgaagcccagaaaagagttacgatttacagaactgcagtctggacagctggaggttaagtggtcctcgaaattcaatatttctattgagcctgtgatctatgtggtacaaagaagatggaattatggaatccatcctagcgaagatgacgccactcactggcagacagtggcccagaccacagacgagcgagttcaactgactgacataagacccagccgatggtaccagtttcgagtggctgctgtgaatgtgcatggaactcgaggcttcactgcccccagcaaacacttccgttcttccaaagatccatctgccccaccagcaccggctaacctccggctggccaactccaccgtcaacagtgatgggagtgtgaccgtcactatagtttgggatctccccgaggagccggacatccctgtgcatcattacaaggtcttttggagctggatggtcagcagtaagtctcttgtcccaacaaagaagaagcggagaaagactacggatgggtttcaaaattctgtgatcctggagaaactccagccagactgtgactatgttgtggaattgcaagccataacgtactggggacagacacggctgaagagtgcaaaggtgtcccttcacttcacatcgacacatgcaaccaacaacaaagaacagcttgtgaaaactagaaaaggtggaattcaaacacaactcccttttcaaagacgacgacccactcgcccgctggaagtcggagctcccttctatcaggatggccaactgcaagttaaagtctactggaagaagacagaagatcccactgtcaaccgatatcatgtgcggtggtttcctgaagcgtgtgcccacaacagaacaaccggatcagaggcatcatctggcatgacccacgaaaattacataattcttcaagatctgtcattttcctgcaagtataaggtgactgtccaaccaatacggccaaaaagtcactccaaggcagaagctgttttcttcactactccaccatgctctgctcttaaggggaagagccacaagcctattggctgcctgggcgaagcaggtcatgttctttctaaggtgctagctaagcctgagaacctttctgcttcattcatcgtccaggatgtgaacatcaccggtcacttttcttggaagatggccaaggccaatctctatcagcccatgactgggtttcaagtgacttgggctgaggtcactacggaaagcagacagaacagcctacccaacagcattatttcacagtcccagattctgccttccgatcattatgtcctaacagtgcccaatctgagaccatctactctttaccgactggaagtgcaagtgctgaccccaggaggggaggggccggccaccatcaagacgttccggacgccggagctcccaccctcttcagcacacagatctcatcttaagcatcgtcatccacatcattacaagccttctccagaaagatactaaactgttcaaaaagattttgtgaaattgcacagatgtgtaagcttgttgaacttcggccacgagacatgcacacttccagaggcagtgggaactgctcagaggcccggactctcctatgtgactttagtgcaggaagaacttctgtcaatcatggacgcatctggagacaagtgagaaacagtagattggtgaagacagacaccagttccctacaagcatggagaaaatgaagaataggcctgtttaatgctaaattttgttttcatgtatggtgtcgctcatttctattgaattacaacagaactcagttttccctgaatttggagcaccaaactccgccccaaaaaggagagtaacaaatacacaattcacacataacactaagcgtaaatctaatcaataaaatatatttttgactaaattattgattcgatatgaaaaatcaactaagattacacagctttgtttttttgaatctttcctaagatcatttttatcctaggtgatttttaaatgaaaatgtgtaatctaaaatataccagcgaatttaaatctaaaaatgctcctactttaagtaccttgtgctgctctttatgcaaaggtaaatcaaagttccctctataaattatgatttacaaaagacacccaagccagaggaactcaatgaaataagctgctaatcagattttaccttggagaaatgaaaattatttcttggggatgccttttaatatttgatcctattatgtgagagattttcctgatatgttatcttatttatattttcccttattttcctcaatgcagataatagcttttggtgcacttttgtttcaccatctgaaaattcacaaaacttcttgcttcaaatgaaaaaatcccaactattgagcatgtttaaatctttgcagagatttgccttttcttaatcaaagaaaggtctttgtgtgctagaatattattggtaatgttttaaaaattcctttgattgatagagaaggacagttatttgcatttaattcacccatatgctttcaaatctagtatatcttactttttggaaatgttttatgctacaaattagtgccttgtagcatgaacttaagtcaaaacgtgttatcaatatagagtgttgcagtgtatattgtaacaacctaaaacgcagagaagtttaatttaatactgttttttttcttgaaggaatactcacatacatggtttgaaatgtgcatagatatgcatgtctatataattataaatgcatgtgtatatatatgcaaatatatgtacatatacatgtatatacacacagacacatgcatatacatgaatataccttgagcatgaatccctggagaaatcgttttcgtaggctcaccaatggtgagtaaagatacagctcttttaaaggtcataaggataatatattttccccatcaatgctgattctgagaaaagagcaatttatcaaaattaaacactgtaaaagaaaggtgtccatatgtctttacctacctaagtaaaacaggaagaaaatcagtaacattatccttaggttttgacaatggtacttgcttcttgttgttttattgtttcctgaattcatgcagatgcctggccattcctgggaagagtggataactcagaagtcactgtactccacagagcctcactgcagtgtctaaaggtagatgcaaattaaaatgcagggaaaataacttttctgatgttgatgcatgtctttgggaaacacatttataaacatggatacctgataatagatattgaaacccatttcctgtgtgttaaaatatttaaaaagtggatattccaggaatgttttgcagctttgtacaagtaacataaattggacacctcagaatgaaagttcatgttggttctgaatggttcactgcagctcctgtcacaagctgggatggatttatcacattgagttatgaaattacctggttctaagaatttttgagtggcaaaaatagaaaacaatcttcatttgaaaacatccctaagcttgaataaatggataccatagatagcttctcttttttattctggtgtcattaccagcatctgaatttcaagttcttaaaatttcaaaaattaaaatttttcattattagctatccatttatcttttacatgaacttgtcatgaacaaattcaaatgtttatgccagcaaatttttgtactgttgcatagttaaaaatgctgggagtctctgcatagatacaaaatattattaaattattacataaatttaattttataaaatttaatcatgcttcttttgtctggtaatagacattggacagatatttttagttcagatggtgattctgaagcttacatctcccttaaaaaaatctaaagcagctcttatgggcttctaattttaatataaataaataatttaaattttattggtgttattggaagaaaaatgctattaatgggctaataaaaaacatgtgtttctcttatggattttaataagctccagtattattcaaatgatcaaaaatatagttataattttttgaattttaaaaatgtgattgctctaataaagaataaaatctatgctttttaacaaacatagttttggtgcctaattctgtaatatgttttattgaaattagattcatttctctaatgtgagaaaaatatatccagtaatagtattgactgtttaaaaaattgagctcatcaaaaatattgtcatcaaatacaggtggttaatctgacatacattgcagttacatgcattatttttatttacaacatttgctccttaatgatgaatttatctgtgttaccctgtttttctacctggaactccatagaatgatgtttgcaaaccaacatgtgctcttttcagtcattcactgttttaatatgacatggtagagaagataaggtttatggcaggtaattttttgtaatgtgtattaaacgaagttcaaagattagaaatacatctgtgtcctgaaaaccttagatacatagccgactgtatacagaggttcatctcaacctcaacactattgacttttggggctggatagttctctgttgtgggggtttgtcttgtgcactgtaggtttttagtagcatccacactttctcctcaccagatgccagttgcaccctcccccaagttgagacaaccaaaaatgtctccagatattgccagctaccccttgagggatggtacctctggttgagaaccattgctagagaatgatctttactgaatttgccctttataagaaacccagtgaatttctagagcaagtcccaaaaactaagggacagctaagaagttattatggttgacttcaaaggcctaaactgtgttttttatgtccactaaacaacttgattaaaagacggaattttgactcgtgtctgtatcatacaagtacaaatactaattttgccctatgtatccgtaaatgtcatttgtgattttgacttatttatttaatgccctttcttatgccgtgggttttcaagtttactcatttctatggttgcaaataactctaaaacttattatataaactttcatattataggcagaacacaatggctaaatatctgttgcatgtactttaaagtttattataaaatataaacagatatataaagatgttgactcttacctgtgattttgcatggtcagactcggtgtcaggtacggagaggattctcatgactgtcttacctctactgaatattctagtgagttatatgatttacggagtgattaacagaggtctatataaagttacttttcccctttacttaattatattgtagtgtgcagataacaaaactgctaccttctcatccaagtggtctgtagaattcatgtcccttacagtggtcatttaaagtcaatatttatttatgtatgtaataaaaaaagttggatttttgtgtatgtctgtcacattatttagagagaagtaatcttgtaaaaatgttttgtaaaaaacaaaaaagtattgtaaatagtcttgatattctgtgactcattattttcatgttagagtttgtacatactggttcaataataaagtatccttaaaccaga

SEQ ID NO: 320 - DNA, 1713 bp, Homo sapiens
gcgcgagtgctcccgggaactctgcctgcgcggcggcagcgaccggaggccaggcccagcacgccggagctggcctgctggggaggggcgggaggcgcgcgcgggagggtccgcccggccaggccccgggccctcgcagaggccggccgcgctcccagcccgcccggagcccatgcccggcggctggccagtgctgcggcagaagggggggcccggctctgcatggccccggctgctgacatgacttctttgccactcggtgtcaaagtggaggactccgccttcggcaagccggcggggggaggcgcgggccaggcccccagcgccgccgcggccacggcagccgccatgggcgcggacgaggagggggccaagcccaaagtgtccccttcgctcctgcccttcagcgtggaggcgctcatggccgaccacaggaagccgggggccaaggagagcgccctggcgccctccgagggcgtgcaggcggcgggtggctcggcgcagccactgggcgtcccgccggggtcgctgggagccccggacgcgccctcttcgccgcggccgctcggccatttctcggtggggggactcctcaagctgccagaagatgcgctcgtcaaagccgagagccccgagaagcccgagaggaccccgtggatgcagagcccccgcttctccccgccgccggccaggcggctgagccccccagcctgcaccctccgcaaacacaagacgaaccgtaagccgcggacgcccttcaccaccgcgcagctgctggcgctggagcgcaagttccgccagaagcagtacctgtccatcgccgagcgcgcggagttctccagctcgctcagcctcactgagacgcaggtgaagatatggttccagaaccgccgcgccaaggcaaagagactacaagaggcagagctggagaagctgaagatggccgccaagcccatgctgccaccggctgccttcggcctctccttccctctcggcggccccgcagctgtagcggccgcggcgggtgcctcgctctacggtgcctctggccccttccagcgcgccgcgctgcctgtggcgcccgtgggactctacacggcccatgtgggctacagcatgtaccacctgacatagagggtcccaggtccccacctgtgggccagccgattcctccagccctggtgctgtacccccgacgtgctcccctgctcggcaccgccagccgccttccctttaaccctcacactgctccagtttcacctctttgctccctgagttcactctccgaagtctgatccctgccaaaaagtggctggaagagtcccttagtactcttctagcatttagatctacactctcgagttaaagatggggaaactgagggcagagaggttaacagatttatctagggtccccagcagaattgacagttgaacagagctagaggccatgtctcctgcatagcttttccctgtcctgacaccaggcaagaaaagcgcagagaaatcggtgtctgacgattttggaaatgagaacaatctcaaaaaaaaaaaaaaaaaaaaaaaaaaaagaaaagagaaaaaaaagactagccagccaggaagatgaatcctagcttcttccattggaaaatttaagacaagttcaacaacaaaacatttgctctggggggcagggaaaacacagatgtgttgcaaaggtaggttgaaggga

SEQ ID NO: 321 - DNA, 520 bp, Homo sapiens
tatttcaggcagaggtgcgctctgtaatgttgggcctttgacttcacagtactggagagctgttcacacagatgtttagacctttctctctctctctcttttcttctttctcaacaactctttcacagaggcagtcattttgaaaggttgaaatatttggcctttaccaaagagctttttttttccttaagcaaaatcctttcagaaagaaacaaatggggaagggcagattaagaatgcatatgtcccaatccacttctataggagtttaatcatattcacatgagtaaaatgatggaagaactctttaaggtaatcctttgggataaaggatcctgggaagttctctcaggtaaagaaagcttacagcagatttgtaatatatgtctggagagctatttataagaaatttaagaggattgttttgttttcctttattaaagatttaagcctttttactttgccaaaagaaaactacaaaagttttatagatataacctttgctaattttttaaccttt

SEQ ID NO: 322 - DNA, 199 bp, Homo sapiens
  misc_feature: n=a,t,g or c
atctctagtgcagaagtgcagctttctgcaggctgcgctcaaatcgctaagttccactctccatcctctgccgcgctactcctggcatgtggatcaccaagatacaatttctggtcctgtctgttcttattgatgtcctttacagttaataaatttgattgccactaaaaaaaaaaaaannaannnaaaaaaaaaaaaa

SEQ ID NO: 323 - DNA, 298 bp, Homo sapiens; identical to SEQ ID NO: 237

SEQ ID NO: 324 - DNA, 9453 bp, Homo sapiens
gagctcacattaactatttacagggtaactgcttaggaccagtattatgaggagaatttacctttcccgcctctctttccaagaaacaaggagggggtgaaggtacggagaacagtatttcttctgttgaaagcaacttagctacaaagataaattacagctatgtacactgaaggtagctatttcattccacaaaataagagttttttaaaaagctatgtatgtatgtgctgcatatagagcagatatacagcctattaagcgtcgtcactaaaacataaaacatgtcagcctttcttaaccttactcgccccagtctgtcccgacgtgacttcctcgaccctctaaagacgtacagaccagacacggcggcggcggcgggagaggggattccctgcgcccccggacctcagggccgctcagattcctggagaggaagccaagtgtccttctgccctcccccggtatcccatccaaggcgatcagtccagaactggctctcggaagcgctcgggcaaagactgcgaagaagaaaagacatctggcggaaacctgtgcgcctggggcggtggaactcggggaggagagggagggatcagacaggagagtggggactaccccctctgctcccaaattggggcagcttcctgggtttccgattttctcatttccgtgggtaaaaaaccctgcccccaccgggcttacgcaatttttttaaggggagaggagggaaaaaatttgtgggggggtacgaaaaggcggaaagaaacagtcattcacatgggcttggttttcagtcttataaaaaggaaggttctctcggttagcgaccaattgtcatacgacttgcagtgagcgtcaggagcacgtccaggaactcctcagcagcgcctccttcagctccacagccagacgccctcagacagcaaagcctacccccgcgccgcgccctgcccgccgctcggatgctcgcccgcgccctgctgctgtgcgcggtcctggcgctcagccatacaggtgagtacctggcgccgcgcaccggggactccggttccacgcacccgggcagagtttccgctctgacctcctgggtctatcccagtactccgacttctctccgaatagagaagctacgtgacttgggaaagagcttggaccgctagagtccgaaagaactccgtggatattccagctttcccacaagcactgatcattatgagccagttacttaaccgatctgagacactctcacctcctaaatagggatagatgatactaatttgcaggttgtcattatgataagacaggatctgatcaatatatgtgaattgtttatatttggaacctttttattgagtggaagaagttgttttaaatattctagtcagttctttcctgctcccaggaaagcccggattatgttttaagataagcaaaatgtcttaaaagtaagctgttttactttgaatttttccctaaatgttgattagtgtactagatccattttaatttggaaagtgaagtgctacttatttgaacttcttaaaaatgctaattttaacatctaaagagttaactaagaaaagcttagtaacatgatgtaccaagttgaatatgctgttatccttatttagaatagaaaattggtatttctacgttttatccattctaaggcaggttaaaaaattgtatttccatgactacctatatatttcttgaatttattattgtaaagttgattcatagtcaaacaattaaatgtttaaattaagattaagacactagagaatgatttatttgctgtcctttaattgcagcaaatccttgctgttcccacccatgtcaaaaccgaggtgtatgtatgagtgtgggatttgaccagtataagtgcgattgtacccggacaggattctatggagaaaactgctcaacacgtaagtttgtcctttggttgcctcattaggagtggggctggatacagttatcattgtatagatttgtgtcttataatgagtcccattaatttctccctccctttcttcgtcttcttgcagcggaatttttgacaagaataaaattatttctgaaacccactccaaacacagtgcactacatacttacccacttcaagggattttggaacgttgtgaataacattcccttccttcgaaatgcaattatgagttatgtcttgacatgtaagtacaagtgtctttctaaggtttttagccttctcaaagaaaaatatgctttataatactgtaagcctaatctaaaaacatatttccaagcttatcaaaaagactttaagatagcttttaagtttgccttccatcttaatcgccaaaaatattgacatttagtcccatccagtttatacagtctgctcacaactctgtatacctcttctaacctttactgtttggtcagtttgtggaggtagcatggtccagctgtttattgaatgcccatgggccacagaattgttctgaacatgtagcacccattaaaataaatttggatttggatcagcaagaaaataactttccatgattctaaagtgggtgccatactcagccattcctttcataggcctcttggatagtgagcagatggctacctgaaaaatcaatattgccagattataatgtgcagagtatatgtattttattaaagatgtatttcaagtggccattagactataaagtgtagttgtttaaaaatagattttttttattttggagttacattcaacctcaggtgccactttccacattttacaataaaaataatggttgatttacttaacaaatgagaataaataaaacatttttttctttgaaaatttcagccagatcacatttgattgacagtccaccaacttacaatgctgactatggctacaaaagctgggaagccttctctaacctctcctattatactagagcccttcctcctgtgcctgatgattgcccgactcccttgggtgtcaaaggtgagtaagaagaatccattagagatgtattaactataagacgggctgcattgctgccaaaaaaaaaaattgaccttagactaccatttatttattaacaaaagcagtttttacttttagcatggttatctatgggtattttttaaagtatgagtctatataaactattatgtaaaagcaaatgagcgtcttggtataatgtcttaatattttcaaattatttctttagaaatgaaataattctaattaaaatagataaaatcattcagtaagaagttgttccaccatatcttagaactgttgtttatattatgatcctattcacaattgtaattctcatataaatgaagaattcttggtagattgacagtcaccatctcctttcttgaatacatagatggattcttaccttagctttctcatttttcaggtaaaaagcagcttcctgattcaaatgagattgtggaaaaattgcttctaagaagaaagttcatccctgatccccagggctcaaacatgatgtttgcattctttgcccagcacttcacgcatcagtttttcaagacagatcataagcgagggccagctttcaccaacgggctgggccatggggtaagatagagttaatatcttagagttagtaaaattataccaaatcatagtcaagggctaacattaaaggagatatacagatagatagatccaaataacttatccactttttttaaaaagaagtcttatctataaaaaccttaaaggaattttccatttacttcactggtctagtaaaattatacacacacacagacatgcacacacatatataaacattcacacacatacatatgtacaggtattgttatttgtaatttgacccttgtattttttagtttaaaatgttagtactgcaaaatgttatgtcctcaaaaacacattgtaccatgattatgccgctttcaatattgtaaagtgaggtttttgccgcattattattttttggatttcaatagcatagcttcaagttattcgtaagaattttttataaataatacatttttatacttttttataattaccatatcatcatagtgaagtatataatatatatgatataagctcaatatagtatattaattccgttaaacacaaagacatatcagtttgtagctttggtggataaacaaattaatttagcaattcatggctatgaaaaatgtatattttatttaaaaattttaaagaaagctaaatgatcaaattatttaatgatgaattatatgatagacactttatataagaaaaacttcaacagcaacaaattaaaattttttcatcattttctaggtggacttaaatcatatttacggtgaaactctggctagacagcgtaaactgcgccttttcaaggatggaaaaatgaaatatcaggtatgcttcctttgactattaagacttagttattaccgcttatacccatattttaaaatccctaaaaatgtgttccttaactttttaactgatgtttatttatttatttatttttttagataattgatggagagatgtatcctcccacagtcaaagatactcaggcagagatgatctaccctcctcaagtccctgagcatctacggtttgctgtggggcaggaggtctttggtctggtgcctggtctgatgatgtatgccacaatctggctgcgggaacacaacagagtatgcgatgtgcttaaacaggagcatcctgaatggggtgatgagcagttgttccagacaagcaggctaatactgataggtaaacaagaaaatgatttatataaaaccctcttccccagggaaaattagtgtgctatctttgttatgttttgagtaaatgacaagatgtggtaaatgaaaactcacacattctatatacattaaatatgtaagcatgactgataaaatagctatcttttgatactgacaaggaagaaaacagaaatgaaggaatagcaaattttaaaaattgcattccagttgcttgaaagcttgtgatcagatgcaataaatgtttttattatttattttgtgcaaataggagagactattaagattgtgattgaagattatgtgcaacacttgagtggctatcacttcaaactgaaatttgacccagaactacttttcaacaaacaattccagtaccaaaatcgtattgctgctgaatttaacaccctctatcactggcatccccttctgcctgacacctttcaaattcatgaccagaaatacaactatcaacagtttatctacaacaactctatattgctggaacatggaattacccagtttgttgaatcattcaccaggcaaattgctggcagggtaagcattattattgaaaaccaaaacaaaagactagtcagtaactttagaatttctgccacggaaattatttttcttaaacttactaaaagagtagttagttatattgctagtaaaattattttattgatataagaagcctaactttgtttgaaaagtctaaacttttagtctagtctacagttgtcagacaaatagcaaattgtacccctaccttaaaaatattttcaaaaagtatctataatcttataggaataaatattttaggcttgaatactagtgttatttttgaaatgtaaaaaggcaaattagttctaggctggtgtcccattgaattttaagcagagctcctgttgaaatgtaggtaagcatctttccagcaaataaaaattgtctccgctgggagtttcagttttacctgatttgtacctaaggcaagctgaatacaaacagtaaatatgcctaaaattcttgttttacaactaattttactttccacaggttgctggtggtaggaatgttccacccgcagtacagaaagtatcacaggcttccattgaccagagcaggcagatgaaataccagtcttttaatgagtaccgcaaacgctttatgctgaagccctatgaatcatttgaagaacttacaggtaagaaacagtttctaaacttcttcgttttttgtttgtttgtttgtttttgttgtttttggttttcttttcgagatggagccgccctctgtcacccaggctggagtgcagtggcgccatctcggctcactgcaacctccgcctcctgggttcaagcaattctcctgcctcaacttcctgagtagctgggactacaggctcacgtcgcacgcatggataattttttgtattttcagtatagacggggtttcaccgtgttagccaggctggtctcaaactcctgacctagtgatccgccggcttcggcctcccgaagtgctgggattacaggcgtgagccaccgcgcctggcccctaaacttcttaaaagaatcaggggtcaaatggaaacagagaagttggcagcaaattgagcaaaagaatcaaactgttttttattttgtgaagtttgacattggttgtatctctgtcttcatcgccttcacaggagaaaaggaaatgtctgcagagttggaagcactctatggtgacatcgatgctgtggagctgtatcctgcccttctggtagaaaagcctcggccagatgccatctttggtgaaaccatggtagaagttggagcaccattctccttgaaaggacttatgggtaatgttatatgttctcctgcctactggaagccaagcacttttggtggagaagtgggttttcaaatcatcaacactgcctcaattcagtctctcatctgcaataacgtgaagggctgtccctttacttcattcagtgttccagatccagagctcattaaaacagtcaccatcaatgcaagttcttcccgctccggactagatgatatcaatcccacagtactactaaaagaacgttcgactgaactgtagaagtctaatgatcatatttatttatttatatgaaccatgtctattaatttaattatttaataatatttatattaaactccttatgttacttaacatcttctgtaacagaagtcagtactcctgttgcggagaaaggagtcatacttgtgaagacttttatgtcactactctaaagattttgctgttgctgttaagtttggaaaacagtttttattctgttttataaaccagagagaaatgagttttgacgtctttttacttgaatttcaacttatattataagaacgaaagtaaagatgtttgaatacttaaacactatcacaagatggcaaaatgctgaaagtttttacactgtcgatgtttccaatgcatcttccatgatgcattagaagtaactaatgtttgaaattttaaagtacttttggttatttttctgtcatcaaacaaaaacaggtatcagtgcattattaaatgaatatttaaattagacattaccagtaatttcatgtctactttttaaaatcagcaatgaaacaataatttgaaatttctaaattcatagggtagaatcacctgtaaaagcttgtttgatttcttaaagttattaaacttgtacatataccaaaaagaagctgtcttggatttaaatctgtaaaatcagatgaaattttactacaattgcttgttaaaatattttataagtgatgttcctttttcaccaagagtataaacctttttagtgtgactgttaaaacttccttttaaatcaaaatgccaaatttattaaggtggtggagccactgcagtgttatctcaaaataagaatattttgttgagatattccagaatttgtttatatggctggtaacatgtaaaatctatatcagcaaaagggtctacctttaaaataagcaataacaaagaagaaaaccaaattattgttcaaatttaggtttaaacttttgaagcaaacttttttttatccttgtgcactgcaggcctggtactcagattttgctatgaggttaatgaagtaccaagctgtgcttgaataacgatatgttttctcagattttctgttgtacagtttaatttagcagtccatatcacattgcaaaagtagcaatgacctcataaaatacctcttcaaaatgcttaaattcatttcacacattaattttatctcagtcttgaagccaattcagtaggtgcattggaatcaagcctggctacctgcatgctgttccttttcttttcttcttttagccattttgctaagagacacagtcttctcatcacttcgtttctcctattttgttttactagttttaagatcagagttcactttctttggactctgcctatattttcttacctgaacttttgcaagttttcaggtaaacctcagctcaggactgctatttagctcctcttaagaagattaaaagagaaaaaaaaaggcccttttaaaaatagtatacacttattttaagtgaaaagcagagaattttatttatagctaattttagctatctgtaaccaagatggatgcaaagaggctagtgcctcagagagaactgtacggggtttgtgactggaaaaagttacgttcccattctaattaatgccctttcttatttaaaaacaaaaccaaatgatatctaagtagttctcagcaataataataatgacgataatacttcttttccacatctcattgtcactgacatttaatggtactgtatattacttaatttattgaagattattatttatgtcttattaggacactatggttataaactgtgtttaagcctacaatcattgatttttttttgttatgtcacaatcagtatattttctttggggttacctctctgaatattatgtaaacaatccaaagaaatgattgtattaagatttgtgaataaatttttagaaatctgattggcatattgagatatttaaggttgaatgtttgtccttaggataggcctatgtgctagcccacaaagaatattgtctcattagcctgaatgtgccataagactgaccttttaaaatgttttgagggatctgtggatgcttcgttaatttgttcagccacaatttattgagaaaatattctgtgtcaagcactgtgggttttaatatttttaaatcaaacgctgattacagataatagtatttatataaataattgaaaaaaattttcttttgggaagagggagaaaatgaaataaatatcattaaagataactcaggagaatcttctttacaattttacgtttagaatgtttaaggttaagaaagaaatagtcaatatgcttgtataaaacactgttcactgttttttttaaaaaaaaaacttgatttgttattaacattgatctgctgacaaaacctgggaatttgggttgtgtatgcgaatgtttcagtgcctcagacaaatgtgtatttaacttatgtaaaagataagtctggaaataaatgtctgtttatttttgtactatttaaaaaaaaaaaaaaaaatcgatgtcgactcgagtc

SEQ ID NO: 325 - DNA, 1620 bp, Homo sapiens
ctctaaagacctacctagatgtggacggggcctggcgcaccaccagctgtgacaccaagctgcagggggctgtgtgtggggttagcagtgggccccctcctccccgaagaataagctaccatggcagctgtccccagggactggcagactccgcgtggattcccttccgggagcactgctattctttccacatggagctgctgctgggccacaaggaggcgcgacagcgctgccagagagcgggtggggccgtcctgtctatcctggatgagatggagaatgtgtttgtctgggagcacctgcagagctatgaggccagagtcggggcgcctggctgggcatgaacttcaaccccaaaggaggcactctggtctggcaggacaacacagctgtgaactactccaactgggggcccccgggcttgggccccagcatgctgagccacaacagctgctactggattcagacaacagcgggctatggcgccccggcgcttgcaccaacatcaccatgggtgtcgtctgcaagcttcctcgtgctgaacagacacttctccccatcagcgcttccagaaaaccagcggccctggtggtggtgctgatggcggtgctgctgctcctggccttgctgaccgcagccctcatcctttaccggaggcgccagaacatcgagcgcggggcctttgagggtgcccgctacagccgcagcagctccagccccaccgaggccactgaaaaaaacatcctggtgtcagacatggaaatgaatgagcaacaagaatacaaccacgcgcgtgggcagggccagggcgggaagatctggggaactggggccctgggtcagtctggccccccaccagctgcctgtccatttggcctatggaagggtgcccttgggagtccctgttcccaaccggaactgggcataccctgggctggtggggtgccaccctcccacaagggctgggctgagacccagctgagtgcaccgtggcgtttccctttctgggggggcctgaggtcttgtcacctggtcctgtgcccccaccggaaccatatgttagatgggaaggggaacgagacctctttctccccagagcccccggcccaggcctgtttcatccgcgccccaggaccccttctttgcagagcccgaggagcctcccctgtcccctcgggcagatctgttgtgtctctcttcccacctggcagcctcagctctgtgcccctcaccctgctccctctcgccccttctctcccaccccttccttctgagccgggccctggggattggggagccctcttgttcctgatgagggtcagctgagggggctgagcatccatcactcctgtgcctgctggggtggctgtggggcgtggcaggagggcctaggtgggttgggcctgagaaccagggcacgggtgtggtgtctgctgggctggagataagactggggagagacaccccaacctcccagggtgggagctgggccgggctgggatgtcatctcctgccgggcgggggagggctctgcccctggaagagtcccctgtggggaccaaataaagttccctaacatctccagctcctggctctggtttggagcaaggggaagggttg

SEQ ID NO: 326 - DNA, 592 bp, Homo sapiens
  misc_feature: n=a,t,g or c
ttgtantgcattataataacgttcatgaaatcgttacgttgacaggttgggttaatatgaagcttggaatatttttcagtgttttagtaaaactgcaagggtaaaatgcccttaatgccagggaaacacacacaggaaatcaantaccagcatttacacgtcagtaacccttcaagttctgccaccctgtgtggggtaatgccgtgcagctaaaatatgatttacgcaacaccatgactaaggaatttctcatagaacttaantttcttnngaaagctattnggggtttggggcaataagtctatccgggcttactaaatagtnggcccaatgtgctttgtgtgtgtttttagaaacttcttcattggtacccattacagaaaagtnccatgtnattgnnnttgaaaaaccagnggtgtcncccctcttacccaggggggntggaanggtcccttggnacaattttttcaagtgnttccttccctcaattcactnccnncccggnnggnatccantngttccnnttctcnccnnnnnnnnnnnnnnnnnncnnccccccctcctncccctnnctccnntccnccncnttttc

SEQ ID NO: 327 - DNA, 441 bp, Homo sapiens
ctctagcacagaggcctgagtcatgggaaagagtcacactcctgacccttagtactctgcccccacctctctttactgtgggaaaaccatctcagtaagacctaagtgtccaggagacagaaggagaagaggaagtggatctggaattgggaggagcctccacccacccctgactcctccttatgaagccagctgctgaaattagctactcaccaagagtgaggggcagagacttccagtcactgagtctcccaggcccccttgatctgtaccccacccctatctaacaccacccttggctcccactccagctccctgtattgatataacctgtcaggctggcttggttaggttttactggggcagaggatagggaatctcttattaaaactaacatgaaatatgtgttgttttcatttgcaaatttaaataaagatacat

SEQ ID NO: 328 - DNA, 477 bp, Homo sapiens
  misc_feature: n=a,t,g or c
gaaagctgacagtctgttctttgtaaactgcctttccctgtttttctgttttgttttgtttctcaagtttcattttttactaagccccttctgacacctaggcagataaagataagagtagtgcgcagtacaaatgtcagctctgaagaggaggaagtaaatcttcaatgctagggcagatcttcactatccgtgatccagtcttaatttgagcatgagagcaaaatttagtcatctacacaagaagcaaaagcaaggaatagttgttgggtttttgttttttggttgttgtctntnttntntttttaggcaagaagtgttgccggtaggnatgtgtgctttctttgccttcctatttcctttcaaagaaatccctgtaaattcaaaactgtgaaattgggttgccaaaaactgttgncctcgttagatgcctccaacagtgtaaatcnatactgcaccatgtccacctntgggtcc

SEQ ID NO: 329 - DNA, 491 bp, Homo sapiens
  misc_feature: n=a,t,g or c
gcaattttctcaactaaaaatagagatgataatccgaattctccatatattcactaatcaaagacactattttcatactagattcctgagacaaatactcactgaagggcttgtttaaaaataaattgtgttttggtctgttcttgtagataatgcccttctattttaggtagaagctctggaatccctttattgtgctgttgctcttatctgcaaggtggcaagcagttcttttcagcagattttgcccactattcctctgagctgaagttctttgcatagatttggcttaagcttgaattagatccctgcaaaaggcttgctctgtgaatgtcaagatgtaattgtaaatgtcagtaatcacttcatggaacgctaaaatggangaatgtaaggtatttttttaaatggtgggnggaatttccaaaattnggtttgaccnaattccgggaaattaccaaggatttcctatggccgggatttaccnttca

SEQ ID NO: 330 - DNA, 477 bp, Homo sapiens
  misc_feature: n=a,t,g or c
gtgcttcattggtatttattgcacatggaccaattcctcacacagtagttagttgcaccagagtataaatacttggtaaaacacacaagaggaagtagaatttacacacaagtgctaactttcaccagcaaattcacgtgggcacttggacataaaaaaaaataaaaaatccttaagataattatatttataatatggatacagttacagtaccatgataaaggagtataaaaaggtattttcccaatgaatcattagctcaataacatactagacaacagaagtagagtttgaattttatttaagatctgcccagcccctctccctttaaaaaatatttaatttctttttgtgcaagtaacatcttctgtgggattttgtaattcctaacactgtggcaaaaatgggcattttggaaccactccttttttttggttttnggtttttatccacatgngcagtaatcnggaactggtt

SEQ ID NO: 331 - DNA, 460 bp, Homo sapiens
ttttttttttttttttttttttttttttcttacagtaccatgggaacaacagtgattgacttgcaaagttttctgtctctatggaaaatgcaaaacagtactacagaaatacacaatgcactgtaagcagcggtttgctgtagtggtccaacaggtacaagcaaacattttggctcagctaggcagtaatccacttaaaccacatcccggggctacggcgacccaaccacagctcctgtgggatcaaaaagaatgggtctgtttaaaaataaaaattgttatgttttgtgctgctgtccaaaggctcaaaggacagagtcatgaggcagaagtttcccaaccagatctagaatcactgggaccacttccttcctttcccttctaccaacctagagacttggactatggtttcaaagtgaaattggcatttctaacaatgaatacccacagccctcactta

SEQ ID NO: 332 - DNA, 273 bp, Homo sapiens
ggagatagggtcttgctatgttgttgcccaggctggtcttaaacttctggcctcaagtgatcctcccaccttggcctcccaaagtccttggatttcaggcaccagccaccatgcctggccacaaagactatttaataaggaaaaatcctcaaaatgttacataaagatcacatcacaaaacttttacatacagtgttattctgatttatttttgaaggggtaaggagaaggaaaatatatcacttttaaaacgtggaactttcaatttgttgt

SEQ ID NO: 333 - DNA, 320 bp, Homo sapiens
ggccaaaaatactgtatttttaaccagcaagatcattggggcattattatacaacattaggtgttttttgcaaaactagttcccatccccaaacaatagacagtacatgcatttgaatgacattttaggaacagtaaatattcttttaaatactgcaagttaaaaatgttttctgacaaaactccctaaatacataggtctagtaagggtttccaacaggatgatgggtgaggaatccagcaaggagttgcatttagaagagttctttgaggaaaagaaatccaccaaaaacgtgtttcagtcaaagtaacctggacaaa

SEQ ID NO: 334 - DNA, 458 bp, Homo sapiens; identical to SEQ ID NO: 107
  misc_feature: n=a,t,g or c

SEQ ID NO: 335 - DNA, 397 bp, Homo sapiens
aacaaagaatacattattattattataaggtactcatgagtaaagaacaatgaataatatacatctaattttttaatactcaatgcacaatcaacatttctgatcaacagtataaaccatataaaagagaattctgcttttcatttgtacaaatactgctttcatcattgcaaaactttcaaggttaaaacgtaccatatgttgaagctataaagctattgcttgaatgtttctaaaacgaagttatttgctgtctgttgttaatcggttacattgtcacctctaataccagtcatcaaatccataggatctcttaatttccaagagattgtattgtacagcaagattatttttgtggccaaatcaggtcataggattcctttttttttaaagataa

SEQ ID NO: 336 - DNA, 412 bp, Homo sapiens
cacctttcttttgtttatttatattctttagttttgtgcacactttgaggaattgatttaggacaggttcatactgaaaaaaacctcagctgatgttatctgtgggggctggggagggtgtcagggacatttggtggctgaggagagcgcgtcactgctattgaatagctccatttaacaccagccatgtctccgcgtctcaggcacttctgtgaaatgttctcagaaccctgtggtgactgcggcacacccggcaggccttgctagcacacgccgcccactggcagggcccggccaccctggctgttgccattctttcgtagggttttgttcattttactatttgtcatttttctaggaaacatctgtttttgtaaaacaaacaagggggaatcaagtattttaaccacaa

SEQ ID NO: 337 - DNA, 656 bp, Homo sapiens
  misc_feature: n=a,t,g or c
tttttttttttttttttttttttcctaaagacagcatgctttattttctcaaaattccatatgtgactatgagcgtatggagaaatcgtttgatttttaaatttattgttttgtccttggtaggcaatctccttcaaatattattagcaaaatcaaacatagatcaaagtatgtatttgcatcttctgattgaaattaaacagtacttggtttcaaatgttttaaaaataacactttttaaactggagttgatattgaggatcatgtaaaattattctttatagactttgcattctaaatatgaagtttattgttactacttattagttaattccacggcagattttcatttctatcgaatatattatatgtagaaactagggcctaaataattaagctgacttttcctattagttattccttaagataaaattatgctggtgaaaatgactgttgaatttctcagaaattaagctctatagaggctaagtaatcgaaagacttttcccctgaataagtacaataccagaagccaaactctataaagatttcgnattataatccaacngaggcntaaaattatgaaaagccaacnttccctaaangcccctgaatggaatcntctaatgcnccagttnagttnctggataaagngc

SEQ ID NO: 338 - DNA, 479 bp, Homo sapiens
  misc_feature: n=a,t,g or c
atcatcataaaaaatatttattataaaaaattatcacatttctctgtacatagcataaagacaaaaacacaatgtatacattaataaattaagtgggcctgagtattcagtatccatctactagaatcctaaagctcttccccagatttcacaaaggccaatgtagattatttctattttatcaaagttcatttgcacagttggtgtaattgagatactaacatttcttttttctagtgttttaaagatagttcacagtatttgagttaattaattaatcaactgatttaaatctttggtaaatacaagtatttacatgtaaaaatgtttagctcaaatttcagtaaaaaactggaaatgaccaataacctactgccaactgttttggtataatccagaaatgcatgagccggactcccaccattaagaaatggcactgtcnaggacctcngatgataaaactggaatccncaaaaaat

SEQ ID NO: 339 - DNA, 391 bp, Homo sapiens
acaagtatctacaaaatctttataaattcacatatttttctgaaagtgtacaagcagtctcaatttactgggacaaaaatgaacatttttgttctttagtaatgaagtcaatgtacaattcagagcaggtgtccatagaaacaactaggtttgaaaaaacttaagacaattcacagttgaaatcaaacaaacactgtgaatgtgttaaatacttgccatataacaacgctttaacattgatcttgctaaataaggctatgattcataagatgcatgtatttccaaagctgtttaacattcttataaattaattcacaggattcaaatagttgctttttagcttcaactgggtattagcaaaaataatacaaaatgatccccgtgcaagcac

SEQ ID NO: 340 - DNA, 523 bp, Homo sapiens
  misc_feature: n=a,t,g or c
cccattgggtgacagcgtttattgaaaggaaatcttgctttatccaggaattcactcacatggaggtagctgcaaggagaatgtctctttctcatgacaaccaaagcgaccaaaccataccctaaagcagagacgcaatggaataagtcaacgggcattgtagaacgacactcagaagcaggaaaaaccataaaagatacaggatgattgtctcttcagtattgcatttggccatgtatgtgtttttacataaaatatatgttttctttttaagctagctaaagaaaatactcttgatcggggttagttcttaaagcaaaaaacagaagaaaagtatgtatatataatanaattaaagaacgatagcatgttatacctggaaaggaccgtgggcactaatctgcactttgttccaggtaatccatggctctgagagtgagcacactgtcaaagtcactggggtgagatgagccgggacttggaaaaccctctcttaactttcagtctcaactcctcccactcc

SEQ ID NO: 341 - DNA, 449 bp, Homo sapiens; identical to SEQ ID NO: 118

SEQ ID NO: 342 - DNA, 185 bp, Homo sapiens
ttttttttttttttttttccaattttaacatagaactttattgaaaacacagactcaaatagagaaccatatatttaaacaacgaatagcagggtagcttacttaggtgacacagttcattgaaaacttaatactgaaaaataccgcaatctggacagcaagacaaatatcaacaaatgtgtttt

SEQ ID NO: 343 - DNA, 364 bp, Homo sapiens
aaaggggaaaaaaaaccaggattaaaggtgattccaactggtaacaacaaatataacagcttgaaaaactcatgacacagacgcataaatataatataaaaagacaattttaaaattgtattgtaggaatataactataataagtggaaaagatacattaaaaccatcagtgtgttacacttgttcaaaacagaactcataaggcagaccaaaactgatgcaagttaaggaaaatggtctgtttttaggaagcatgtccagacagacaccacaaagaaatgccaacagagactatgtggtcccctcttgttactagtaatgtgtcaaaggtggagtgactgggttaacagcctaagctttctcc

SEQ ID NO: 344 - DNA, 543 bp, Homo sapiens
taagagtgttttcagtattttattaacaaatgagctggcaagaggacaagtgatctagtagtatcacccccaccctcatggagcagccaccacaagcccaccatggtggggggtgtccaacatgctctgctggcccagttcccagccgatcccctgagtcttggcgcccgtttagtcacccttcagctgcttgggaggcaggaagagacttcccctcttcacgaggtaagggagacaaaagcagccatttggatgccagggccacaggggcaagccatgccctatttctttggagggacagaatcacttcttcccaaggccagacactgtagcccatggtactcagccttctagaggagggtagcctagcagaggagaagccctgagtggaagcagcattttgaaggcatcgtcattcttagaccagctaagagctgagggcattctctatctttgccagcagacagtgagactcccggattaaaattaaaagcccgtggtgcatcctttccttgacattaactttccacaaaaccttggagg

SEQ ID NO: 345 - DNA, 467 bp, Homo sapiens
attttataaacataactgcatctttaattgggtgtacttgaataattgaaaactgaacagcaaatcaatttttatggttcattttctccaacaaacaacaatattaaactgtatgagaagtaatatttattgcaacaggttatgaggtggaaacaaataattagtcttacaatttgctagaagcatgacagagcttactaacattttgaagaaaaaacagcaaagaaagaaatcatcaaacaagatggtatcttgacaaaggcacagcgctccacaactgcttcatactctgtgcacaagaaatcctctcgagagaggagaggagtgatgccaaatgggcttacattagacccgtggacactaccactggtattattcatacaaccaaggctctacaacacccctctggagaaaaagtgcaacacaaaatctgtgtaacaaaggaaagcaaaagtagcaataagggc

SEQ ID NO: 346 - DNA, 379 bp, Homo sapiens
tactatctagagtctagagctcacagtacagagttttgtgaaatacggtgcctatgagaattttcccatggtacacagaagccacagaggtgccctgaagcacagagccattgttggcatacacggtgctcaccctgggcttctcagacaaaacattctggatgcgaagtacttctgatcctggagggtcctcagggttatagttcagtagcttcataggattaggatggcatcctgccaaaatgtctcctgtggcaggatcgacagtcaggttatccactaaggtgcccaactgtatcaccttcagttgagttaaatcccagttatcatgtttttccattatgtgaatggtcctaactgctacatcagctacatagac

SEQ ID NO: 347 - DNA, 384 bp, Homo sapiens
gctacctcaaattcggtgggcaacgatagttaacactttcctagtttttagtttatttgactgcattcatacatatctgatcttcacgacaacactgtgacaaagggagaggcaagaatgataatcttcattttacagactgaggaactgccgacagacctgccatctgtccaggccaacataactaacaagtagtggagtccaagacctcagcaaaagttttgttcttttacttttgttagagtggagaagaaaaaaaaaaaggtttacaatgattactgagaaatgaagaaataagccactgtttcttacaagtagatggtcccacatcttaaactttggggaagatatttaaaaatattttttaaatagctggctgctgga

SEQ ID NO: 348 - DNA, 341 bp, Homo sapiens
ataacacttgaaagtataaaatgctacatttccaaaaatatatatatttttttctgcaccagcacccttgtatagtaaaagtatctactttttgttcatttgtttcaatgcactacactttatctacaatttcattacatgtatacagcaaataggcaagcatggcttttacatccttaatgatttttttctatacagggaggtttaaaaaaaaatacttgaacagtttgcccagtaatgtgacacataatgcatgtaccttgttctcatatttttttaggtgtaaaataaagattcagtaattttaactcagatatttatctttttaaaaatagtgttgc

SEQ ID NO: 349 - DNA, 410 bp, Homo sapiens
ttttttttttcaaattcagagcatttttattaaaagaacaaaatattaaggcacaaaatacatcaatttttcaaatgaaaacccttcaaacggttatgtcctacattcaacgaaacttcttccaaattacggaataatttaactttttaaaatagaaaaatacaagttcttaaatgcctaaaatttctccccaaataaatgttttcttagttttaatgaagtctcttcatgcagtactgagctccaatattataatgtacacttccttaaaaatctagttttgccacttatatacattcaatatgtttaaccagtatattaaccagtatattaaccaatatgttaaacttcttttaagtataaggcttggtattttgtattgcttattgcatgctttgatcatacaagac

SEQ ID NO: 350 - DNA, 400 bp, Homo sapiens
ctttaaaaccatttacttacaaactttaattcagcaaaggtccgtgtggggagactggggtggggtcgggggaatagtccccttggagtggatgtggacccccagagtcaagggagggaagctggtggcccagttggctgggggcaaggccaggggtcacctcaggtcgacaggtcctgctggtgggcgggcccagagtttatcttcatggagtgctggtttctggcactgggctggaaggaggccagctccagggatctggcctggggtgggcaggcagaattcaagaattcatcttcaacaagcgagtgacagcagaggctccgggagatgggcacaatgtccgactcccacagacagacagcaggggactggcagagaaagcccatctctgcacgga

SEQ ID NO: 351 - DNA, 338 bp, Homo sapiens
cctttttccaatcttcattctcggggttggcccgccccgatagtcactccatgtcctcgtttactggttcatcttcgtaatctctgtcatggtcaaaatctggactgtggttggctgttgtcactaaggacaggggcccttcagcttcctctggatcgaggggctcttctttgacgtgtacaggatgcacggcttgcataggagatctgcctggactgctgtcactctcgttgctgttggtatgctccattgccccgttcagctcttcccgtattgcgctggctaagttgcccagagtgggatttcccatggaagcggtagtgtatagaggtatacta

SEQ ID NO: 352 - DNA, 469 bp, Homo sapiens
agtattatcatttattgagtagctacactgtggccagaactaagctttacatgttttatatcacttatttatctcaacaatcttgaaagggtggtattattttccccgtcttataggtgaagactctgaggttcagaaagttaaagtgatatcgccagggttcctgactggtaagtgatggaggctgaatttgagccagatctatatgctccatcatcactctcctggggaaaagagcctagatgtgttctatctgcattcctgcttagattctgcatgacttctcctgtccatccccttggccccctctcctctagtccatgagattacagctttgcacactgacaggagggtccttccttcttagcctacacatacaaccaggtgtcaaaggatggaagggttcatctcacacactcacagaccatgtagactattcaatctacacctccagctcgaactcagaaca

SEQ ID NO: 353 - DNA, 343 bp, Homo sapiens
ggtgtggccagagctccaatctgtgtcagatatttatttatgctgcttattaaggggtctccaggcacccctgtgacagaagagactaatcagtcatcagccaggacccaggcatgtcctgggctcctgtgtccagcatgaggtctgtggctgatcttgcagctgaggcctgaagggtgagcgaacattgacctgtcccaactttgggcggcctctgccccataagggagactgagcagccagaggctttaaggggatgaaggcctggcctgagcccatgtggccttagggtggaagcaccaggaccacagaacacgtgtctaaaagacttgcctgcctctaa

SEQ ID NO: 354 - DNA, 547 bp, Homo sapiens
tttgggttttgtaaatcatttattatgactgaaagggaagaaaatgataggagacaaatattacaattaaacatgtaacattattctcttgtaaccaatcataataacatactttgaatttttgaatggctatataatttcccagaaaataaaattttcacatcatcagttacagaaaattgatttccttccatcaaaatattttatctctgctctatcaaaaataaatgccaagtctaaggtactacacagtttaagataagccttcactacttgtttaaattagaggagtgtggggaggggcttaccaaatgatgaataaactactgcctgagaataaagccctcacacataagtaacagctctgtcaagcctctggtcaccaactaattattaaatggctctctaggaacttagaaactcttctgtaacccagccaaaaggcttctgagagtcatcacaaactggttaccagtttattctcaaaaacaaatttgcttattcgatgggcgactgtggctcaaaagatgtaggggaaacagtcaat

SEQ ID NO: 355 - DNA, 423 bp, Homo sapiens
tttaattttaaagaaggtatatttatttaacaaacatgtatgaactattcattaacaatccaggactgtggaggacaggggacagaaacaagcctcgaagagatcacaatatggtggagtgcatgcatggcacacctggctatctgaatcagacgtttgcctctgtgtgtgtgatgaagacagtagtgagtggaatggacagagagtaactgtaaattctgtagggaggaaaacgaacgtttactcattctctaacagtcttttgctttactatggtcatatacaacagttaatctcccatcctcagttcccagatacccaccagaaaaccggtaattaacctctggataaactttcactgattacagatgaggagcgaggcaaccttaagccataaacaatattcctacagtatgggggagc

SEQ ID NO: 356 - DNA, 379 bp, Homo sapiens
  misc_feature: n=a,t,g or c
ttttgtggataatatttatttgtatcttatctatagaacaaatatttacagatacaaacggaatcacagcaaagttgctataaaaccatccagacctctcgatggccacttctgaaaacatccacggtgaagggcagggcaggcctggctgtggagtgggccagctgagtacctgggcgtcacaagggaaatggttggggattatggcttcagcactctgccggagcacattcctgagcgctgacaacgtggagccctcaccgcccccacctaccccaacctcaatggggaaggaaaggggcctgagctgggcagggctgccgnggctcactatgtgcctgctccaggagtccctggcccctgtgctggcaggagcatc

SEQ ID NO: 357 - DNA, 393 bp, Homo sapiens
ttttttgggatttcattatctcagtttactttaatttgcttgtttacacacacgatctgtgtgtacataacagtggcaagagccattctctaaatacaatctggtacccagactatgacagatgcacgtggaaaatgaggcgtcagtgaattaatctcaacatagaaaggcaaaataagcatggcagtattctatgatcacagatgcccccagagcctgggggtaaccgacacttttcaacataatacaggacaattttaacaaaagacccagactccaaatggcacccaaaatatattcgtttctctgccttctctagaggagtcagaaagttctaaaggcttactcaagaaaaaggaggcagggagactatggcctgctaagcacagatgc

SEQ ID NO: 358 - DNA, 457 bp, Homo sapiens
ccagtcgggttggagtttatttctgccagagcctggaggctgggagggtaaaggacactcctttagtcccagagggaagctccgaaccctcagagcaaccagaagggagggcagagcatgggcagcagcaggagtgagaggggtccccttgtcctgcccctttgcaagggttcaaggctggtggaggcctggggcttctgtcgctcaggagttcaggggtggacgcagaaatgggggaaggagagtggctacgtagagagtgagagcgagattcctaaaaagatgcacagagagaccctcagagagaagcagagggaatgggttgcactggctgaggatggtggaggagccgtctcactcccttcctaatgtctatagatcaataacgagggaagaaaggaggacagggagctgatggaaacacagcttgccaactgtacccagtcccccaacaagc

SEQ ID NO: 359 - DNA, 286 bp, Homo sapiens
ttcttttttcagtttaattccatttattattctttaaggatacatacatggagataaagtgatgaaagagaagaaggctatggtcaacacaaagttcagtacaggggttccctctatcagacagggatagagataggttcagcaaaccgcacacggtacctcaggggaaaggcaataaggtgggtggtaggcacacaggggtttgtttattgtcattattattactctttatactttagcatatatattatatgtgtatatacatatctatattccattgcatgta

SEQ ID NO: 360 - DNA, 427 bp, Homo sapiens
tttttttttttttttttgctataagataatttattacagactagcctataatctcctgtaacaatggcacatataataattaacaacagcaaagatgcttggtttcttgtttcatgtaatggccagtacatctgtggacaatgtcgagtcctcaggaagtccaggaggctgctacagaggaaatccaagaaccatgtcacatctctcaacaagtcttgggaagtccatctgactctctgaaacagtttgtctctgacctcccaggaagtgtggagggccccttccatccagcctgtacagagggatcagagtccaggctccttctatagggttgaatatcagaggggaatagcaaatgaccccgatgagagagagagagaccaaaggctagattctttctgcaaggtggaggacggctagaaggcag

SEQ ID NO: 361 - DNA, 379 bp, Homo sapiens
gagatataaaaatctgtatttatattacaatgacataaggacacagcacggcccacacggtggacaggtggccggggccactttccccctctagcgcaccccccctcaccggcaccaggccctcgtgtggcccccgactctggcacggaacctgccctagtgcccaacatggacctggggccaccctgctggccgagggtcagggtcctctgtgcaggcagtggggagggggtcccaggttccctgacagagggaggcagggcacgggggagcctgcctcacccagcggacagcacgggccggggcagacagagcagggaccctagggccacagaccggtacagggttccaccacccggggacacaggcccaagcaccg

SEQ ID NO: 362 - DNA, 396 bp, Homo sapiens
gctgaaaaggcatgattttattgcacactcacaatatgacaggtgctgtgctactcatcaacactcttttcaaaacaggatttggagacaggattcttcaaaagagaactgcacattcaactaaacatgtccaaaaaacttcaactcttttgaattagtctccaaatctacacaaaccatagaaaatagaagatcattaaaatacatgattatacacagacaaatggacaaatgaaacagtaattaatattgcttgagctcagattgctcctgtaagatctgcagaaatcgtatgatggggtaaggttttctagaacaatatttcatcaggagataatggcagtatctcattagactaaaaggagatgatagatgctggaagatcagttttcatac

SEQ ID NO: 363 - DNA, 440 bp, Homo sapiens; identical to SEQ ID NO: 147

SEQ ID NO: 364 - DNA, 470 bp, Homo sapiens
tttaacagaggacgtcattttattggctgtccacgggaagtttcatcacacacggaggtgaagactgtgggggttgtggcacacaatatctcaacacgagacctcatcgagcggccaaacagaaggtgaagtgacacccgacacgacggaaccccagccgccctctgcagccccggtgccacctctccacagacgcctcagcccagtaagctgagtgatgacactgtccattagtctcagttcgttgcactgtcttccaacaaaacagcacttgaaaattcacaaaattaaaaaaagaaaaagaaagcagcacttccttggaaatagcaacaccactgtaacacagacggcagcgtggcatgcagatccacacctggtcggttttttccctttaggattttttttttttttaattaacaaatggaatggcaggtctgtttcaaatattagtagcataacacataagtgca

SEQ ID NO: 365 - DNA, 500 bp, Homo sapiens
ttttttccgcaggtctgaaatggactttaattggcttttgtctctagaattacccacccgttcctgcgctctacggttctccatgccccctccagtttgggggtctaaaccgaacaggagaggtgcaggggaccaggaggtgtcctggcacaaaggttcgggggtctccctggcaaggggtcccagggcctggagccgaggcccagccaaaagcacacagcatcaaaacatgtttttagtgggaagctccaggccctgcccctccccgggggcctcgaggatgtggagcaggtggaatcctgtctgcctccaggtcatggcagtgcaggcggtgagctgggggccagcaggggcgcggacagtgcggcgtggtcgaacagagggttgcgcacctccatttccccggtcggggccaggcccgggcactcgtacaccgtgaagtctccgtcctcattctcctcatccgaggaggccgtgtccagctcctctgggtggctctt

SEQ ID NO: 366 - DNA, 406 bp, Homo sapiens; identical to SEQ ID NO: 153

SEQ ID NO: 367 - DNA, 443 bp, Homo sapiens
ttttctcataaacaggaactttattaaactacatgttacataaaagaacatataaatggaccattaaatacattcagtttattttaaacaaatttacatagatacttatttacatttctccattgtattcttaaattatttttccaagcttactaccgataaaaggtaatacaatgatcatctgctcacacagatgcatagagaagttgtccacagggctaagtaaagcaccacttcccaggaaacacagcttattagatcttccagcaacaactcatgctgaaggtgctctcttctgagcagcccttgaggtgaggcttttgctttagagatgctgggggttggttctgaggagctgacccagggcagagatgggtccttgctgattgacctgacttggactcacagaggtggaaagacctgtggagaccatcatcgaggcc

SEQ ID NO: 368 - DNA, 428 bp, Homo sapiens
ttttttttcgtaaacaaaatttaatacaaccatatagtcaagtaataatggttaaaagacattttattagatacaacttttaaaaaattaaactatgcaagaagtatatttaaacaaaacatgtaagtaagtattcacgtgctacaacttaactaagaacaattaaatacaaagcattctttccactatgaagactctggagcctctaattgaaagcaaatgaccttaggtctatactagttgtaaagcagattatacttttgttcaactctaaatttgtattgtcttagagctccaacaactctcaataaaaatttaaataaagaaaccttgggggaggggtgatagggaaggggagagtaagtgcttttttaagaaagttaaatgaaaaagcctgaagagggaaaaaattgtacataagtatggaa

SEQ ID NO: 369 - DNA, 305 bp, Homo sapiens
ttttataaatatgtaactgtatttttcttcctgtccagaaactgttattgaataaaattcaggtatattcctccaaaacccacacagttcagagattttcaaacaccaggtttccatttgtattaaaatgggcaagataatgaaggcacaggctcactttgtatcaataaaggacatcaaacacagtcatgaggcactaatgacataagcaatcacaaaaagcaagtgttcaaagtcttcagtaactcttctccctttaacatttggcaaaactcagtccagatattttaatacctcagaaagaa

SEQ ID NO: 370 - DNA, 412 bp, Homo sapiens
ttttttttagtgctaaaatataacatttaatgtcacattgttgggcgactcccatttactttttccatatatacagtgaagacttacaatagctcacaatgcagttaagaattgcattttaataatctcaaactaccatctaatggaggaaagaataagtttgtcagaaaaccagtacagccattttgctattaaaattttcctttttaataatttatttaaataaggtatttgaagcagtttagaaaaaacaagatttgtattttatttccttgtaaaaatctttacacatgcagacaaaccagtgttaagaaagtattcaccatcatttaaacaaataaccacttaaatagaacagtgtctgcaattttatctgtataaaaataagatacatttttacagaattcacgct

SEQ ID NO: 371 - DNA, 277 bp, Homo sapiens
tttttttttttttttttagttacatagcatctaagttttctgatcactaccaggtaattttcaaccaataagaaaaaggaaccaacactcagctctgtagaaatctaccttcttttagaaacctcaggcctctgcacccctttagacaactcatttacaaccacaaccttccatggcttctcacatgccagccagggcagggtaaaaacggcaatttcttacaccgaaagggcctttttatgtaacaaacagacctccccaaaccacaacttttttg

SEQ ID NO: 372 - DNA, 450 bp, Homo sapiens
ttgtggcagaaacattttaattgtaaacagcaaggctctctgccaggcagcccagatgaacaggggtggcactgtgctggggtgaggtgctttctttgtgggaacgaaagcagacggcccaccctcgtctagccctgggcccctgtccccaaggccagctcgctgagcctgcgctcctcctggaagcggatgagggcatctctctggttgaccaaatccaccagcttcctcaggacctggtcctcagcctgccgatcagcagctgtctttaggttttcttcccggttcatgtagcctcgtagctcctggtccagctgccactgtttctcctccagattcaattcctgcaccgtgatcatgagctcggcctcctcagccaccaggtggtttttcttgtcaacgagctgtagcagctgtcctacccatagtttcttttgctgttctggggaa

SEQ ID NO: 373 - DNA, 465 bp, Homo sapiens
tttttgaattttttaaattatttttattttttgatgaaaacaagaaatacggtagtgacactttatttttccttcaagcacatgggagaagacaaaagtactaaatgatcattgagtttgacagagaaattctactggtacttacactgcttaggaacataaatgtcaagtacattactagggcaagaaatatcaagtaagacaacagagtcgtatttttctttttgaggttattttcacaagacatagctataatttgtaaaatattcagactattgaaagatcacattcaaattatatttctaagaatagagccatatatgaacagagagcaaaacaagctaatacattaatgaatattcactgaattcttcatactgcacaggacacaaatttggtatttttgcacatgttgtcaattataagcaaaaagcaggcctgtaaacatcaattttgtcataggct

SEQ ID NO: 374 - DNA, 207 bp, Homo sapiens
ttttacctcctttctgttgttttatactttatttgagaagagaccctacataaactatgtcaggaggatacaggtctacacacgatttcatcaatcaaaaaatggagttgttaacataacattgaagatatgatactatgagaaagacagacatatgaccaaggagtatttacaactctcacttatgatatatttatattgaagatg

SEQ ID NO: 375 - DNA, 418 bp, Homo sapiens
aaacaaagagggatttattttatttacaagaattctggagaaggatggcggctggtattggcttggtgaaataatgatagggtcaatgactctgtgattctcttggcctttttgtcatggtagcaaagtggctgctgtggctccaggcatcacaccctcaatcaaggtaggaagaagaggcccagggaggtgttagccatgcctgtgtcttttattggaaaagctttcccagaagcccaggtagacttcctcttcaatttcattggccacacctgatcacatagccatcctaagctgcaaaggagactggaacagtgaaaatctggatttacagcctccacagttggagtggctggagatacagagttgggacgacccctgaaaagtgaaccaaggtcgtctgcacggctgccctgga

SEQ ID NO: 376 - DNA, 379 bp, Homo sapiens
gggaacgtgaattttaatgagggggcagaccgaggaggtggtggctgcccggagatcagggccaggctgtgctagatggcgcctggaaggggggtcacccaagtctccctgctgtcatttcaggaggccgacccaagtctccctgctgtcatttcaggaggccgaattttttcccaatcccagagaaggtgtcagaggcctggttagcagtcttgtcgatggtttcctgggtggtcttggccagctggtccatggctttctgccccgcctctgtggcctggtccaccacttgctgagctgccgctccggccgctgacacggcttcctgggcggtcccctccacctgttgcttcaggtcctgcaagcacttgcttgccat

SEQ ID NO: 377 - DNA, 410 bp, Homo sapiens
tagagagttgagtaaaaggtttattattagtgcagtcaacaccatggaacagcacatacaacacaaccagcaacctgcagagacactagtgcaaagggtagggaagcctttcactgagcttcctggctccatctgagggtaaggacaggacagtatgagccttggttaaggcaggtaggggaaaggggagtggaagaaatgtagtaaccagagtaagtatagcagcgttttcaaattcctgagcacaatgtcccagagctggaaccctactcccctcaagctttccaccccaatcccagtggagccatgatccaactacccagacctgcagcaagctagcctggaataaaattctgagaggaagccattacatggtggggaggagcctttctatctccaaccacactccc

SEQ ID NO: 378 - DNA, 442 bp, Homo sapiens
tcaacctactcaccaaaaaatttgcactttgactcatattggcctattttaacatttcaaaatcatttaaagaaaaatatgactttttctgtcataattcccagtcttagtctctatctttgatcaaaaagaggatagggcaatacattaaattgacaaggcatataacagccactgaatctttctgttcatgagaagaaatcccagatacaccataaatgagatgcaaaccagcagtaagaatgatggcaaggtttctgtatttccatcagaaattgtggaaaagggcctaaaaccaggaaagacaaggccattaaaaaaatgtatttgaggccgggtgcggtggctgacacctgtaatccccactactagggaggctgaggcaggagaatcacccgaactgggaatgcagagattccagtaagctgagatcgcgccactg

SEQ ID NO: 379 - DNA, 288 bp, Homo sapiens; identical to SEQ ID NO: 171

SEQ ID NO: 380 - DNA, 597 bp, Homo sapiens
ttttttttttctttttcttttttcttagaatgttagtgatgactgacagttctggtgcacagttacaatgtacaagtgaaatgaatatgatttgcattgttaaggcatccaatctgctggtttatatttatgtgaaagacagaggaaatatacaagcagacttaagaaagaaagtatgttcattgatttctatgaagtttctccctagaatttaatgcacaaaatgcgtcactccaaagggagagattccatgcatattaatagagtaaaacagcattagggttgttttgtaagcttccaaagcaaaggatacatttttttttaaatctactgaactaaatactacaagaataatatgctactatttttttttttgccatatattggaaaaaacttcttaacttacaaataatacaaaaatagacaatgacttttgggtggaaattaaaaaaactgaagcatggtttataacaatacaaaaataactatgaatggaatggtttaaaatcacattggaacagctaatacaagtgtaggtgacccaacaaatacgcacttttcacgtggcaacttgcccttaaatagaagtggggggag

SEQ ID NO: 381 - DNA, 419 bp, Homo sapiens
tttttcatgttaaaatgtgaactttaattgtaaaaatcattttctgtaaatatagttatatcaacctctctgcacacaacttggttcagatatatacagatatgatattcatagatgttatttgtaccacagaacaaaatcaattcaagaaacatttacttttagcttcaggattaaccccagctttctttaggccttaaaattaccaccactggaaacagagagagagcacggcatacctgggcacaccagtattcagggcaaaatctatgcagtgtcttactaatttcatactatgaggtaaagacccgaaacaaaaatagattcagtctctcgtattgctataactcttaggctggggtattaatcaaaataggatttttacatttaaggcgacagggaggctatgctgattctaa

SEQ ID NO: 382 - DNA, 364 bp, Homo sapiens
ttttttttttagtttgaaatacatttttaatttttgaaaaatcaatatgtaatctacaaaatattttgttacatgattaaggctcaacctgtcttatatttgcattgacagaatacaaaactgtattttaagtaagacattataatagtcattgttaaggaagtccttctaactgactttataagaaaaggggctgtatcacaagcatagctctggaatgaagggaactaacatcctagaactgtctaatatatacatcaggttgtaaaattccagcctttatttatgtgctggaaagtatcttttttacatatctttttttagtggataaactcttgtgattcccacagaaaaaggaaatgtt

SEQ ID NO: 383 - DNA, 358 bp, Homo sapiens
gttaaaaaataaaagccaaaataacacttttaagatcccaggttttagacaaggcagctgtagtctctccatcatcctcactgtccatttgcttcttcctgggacagacactgtggcccagtgaagctgaggggaccctgggattcaaagctggtggaatggaccctccctccccccacaagctgtaataacctgctggaatcccacacaacctgagggcttcacttgtcaacagctcccttccctcagaggctattttgaggcaggcattcggtgttttatgactgagctacccaggagaatggtttgaggccacactcaactgttccaaggagcagcactggaccaaaggctgctt

SEQ ID NO: 384 - DNA, 431 bp, Homo sapiens
tttttcaggtttggcacataaattttatttaactttcacattgacacaatcaggaaaccattctgagaaaaggtagaggccgccttgaagcgaacgctggctccctcctccaccccgggctcggcggcaccatgcaggctcaggctggcactcatcccaggaaactgtcccagttctcagcggtcctggctgtggacggtatctgaaatggtcgctgcggcttgccctgcaccagggcctaccttgttgccaggaagccgcactgctggaggctacctgggcgctgggttttattgctggtgaacttggttacccaccttccagtcacatggtccaggatggtggtgtgatcagaaatggctctggcagtgccattttgctgagatgaaaggaatcgaaatgtataaactacactgaattctgtgatgctg

SEQ ID NO: 385 - DNA, 357 bp, Homo sapiens
ttttttttgagagttcaaaccatttactaagcagattcttagccttcccactcccgccctctctcaagctccggtgcccacaagccttgcctggggagatgctggagtgagaccgggagctcaggccaagtcactggtccctgggctcgggcctgccgagtggagtaaagaccagctgtacacatcttccggtgggggccctgggctctgcatccgcccctccgaagtcagcaggagcctctgggaagtaaggcagcagcacagacccccagcgtcttggaggggaagcgaaatcctcagtctgacacccgctctgcctatggaaacagcgccggcacagaaaaggaaacttcattc

SEQ ID NO: 386 - DNA, 370 bp, Homo sapiens
ttgtgtttttttttggtgtatttttaataagatatttaatacgtgttcaggtagaagtaggtacaatgacagaaaataaggtagaggaatgttcttgacaccacagatacgtaatgatggacaataaatgacatgatgtggagagttcacccacacatgcagacttcttatgttcacataaacatttatctgcatgcatcacccagtagagacaaactgcacttatactgtgaagtcaacgaggagataaagtaaaaatcaaatacttatggagagagtcagtctctccatttagtgggaaagccttcagaacacgcacacagcatctcccctcccttctgaataccatccatagcctgcagcagtagat

SEQ ID NO: 387 - DNA, 283 bp, Homo sapiens
ctgggacaattaagctttatttttcatatatatatatayyyycatatatatatatacatacatatataaagggaacaatttkcaaatttacacaactgacaaaaccatatatacacacatatgtatgcatacacacagacagacacacacacccgaagtctctagccaggcgccgtttymcatcccyaagtaccattctctcatttgggcccytctagggktggggcccycgtgccgaattcctkmagcccgggggatccmctagttytagagcggccccacc

SEQ ID NO: 388 - DNA, 224 bp, Homo sapiens
gactattactagtaagacatttattaatgatattattacaattgtttctaaaatccattattatttcagcagcgaagagataaataccagagtaacctcagtcagatggtaacagttaggtctaaagaaaattatatgaaatactgactgtaatactgctatagagtatacagtatgttaaaacatgatggagaggctgcacacattggtaacgttttatgtca

SEQ ID NO: 389 - DNA, 305 bp, Homo sapiens; identical to SEQ ID NO: 201
  misc_feature: n=a,t,g or c

SEQ ID NO: 390 - DNA, 287 bp, Homo sapiens
ttttttttttggtcattaacacagtttattattggcacacttatcagtaaagcatacataaaatacagctgttttttaacacacggagccactgtgcctttacatgtgtggaggaacatattaatatgcaaatggaaaaattaattctcttataaagtttcacataaatacactggagttgcccaaaaacgaaaagtcccataaaagaaccaggtgagagctttacaaaatatcatacaagaaatatactataaaaagaaggatggtcactcaggtacaattagaaa

SEQ ID NO: 391 - DNA, 375 bp, Homo sapiens
  misc_feature: n=a,t,g or c
cacagttanaaannattttattaatatctcacaatctaacttgaaatatttataaacactgcataaatgaatacaagggcactgtatgaattttagaaaggggactcttttatacaaataaatttaggtttaattctgccagataaaattaattttagatatgtccaacacacaatcaaangtattctgaaaagttgtatataggntcaaatcatagtttaanggccattcacaaaataactgtaaattccccaattttatcttttaaaatatggaatttttaatatatcattttcttangggtaaaggtacacctttaattttnggggtggtaaatnggggntaatctttccaaaatgccctttaaaaaattng

SEQ ID NO: 392 - DNA, 372 bp, Homo sapiens
  misc_feature: n=a,t,g or c
ttttagaaaatttattatgaattccgagaagtctgctcatcatatacctcccccagccccaaataaaacaaacaacatgtttgtacataaagcctgggtttacttggnacaaaatttgagtctttgaaaaaaatagttaatggnaaatctcaataaaaattcattttgaaagtaaccngtactgttcaggaaataaggggngtcatgttacttgaggangtcaaacagttttattacaggaactatgtgtatatattttggggnttaaaacttgccnataggctgtttggaaagggntaggctcataatttattccnaatagggtattttnttaatcnaatgtttttggggttatcnaccataaccccntgg

SEQ ID NO: 393 - DNA, 267 bp, Homo sapiens
taagatttgattttcttttatttgtggcactaaaagacagatagctgtgatgaagagcaattggctggtagctcgtgcctcaccaagagtttagcaacgttaatcagtgaatgcagaacagcttccattctacctgaggcctagatctgagatcgctgtgaaacattaaagtgacctcaccatacttgttttctcactcagatacacattttatttcatcaacacatcttgatttctattacttttttcaatataacaaaatgtttt

SEQ ID NO: 394 - DNA, 511 bp, Homo sapiens; identical to SEQ ID NO: 222
  misc_feature: n=a,t,g or c

SEQ ID NO: 395 - DNA, 503 bp, Homo sapiens
aaagaattaccataagttttatttttgcttagttttattaaaaaaataaatatgtcataaagctttctttttccttagggagaaaaaaaggaacaagtctcataaacccaaataagcaatggtaaggtgtcttaacttgaaaaagattaggagtcactggtttacaagttataattgaatgaaagaactgtaacagccacagttggccatttcatgccaatggagcaaacaacaggattaactagggcaaaataaataagtgtgtggaagccctgataagtgcttaataaacagactgattcactgagacatcagtacagatacatcttgcttaaacaacacagaagttcctgaaaagttttgtgtaaatgatataaccacaaacattaccaggagagcttgggtaactgaaagaattccatggcgaattcctttggtgaacaactactttcacttttggtaaatccaggtatttgctttttataaggagtttacctagttgc

SEQ ID NO: 396 - DNA, 438 bp, Homo sapiens
cttataaaatggaaaactttaattgtttaaagaaaaggcacaagtaaacatttcaggttatcatacaatgttacaataaaaaattccaatagcaaaatgaaacacattataactttgcttcttggtagtatactgaatgtattattctatcatctcctctttggagtaaaaagaagggataggcagatcaatggatgtgatgtaaaaacttggatcataaatagcatccactatacctttaaccagaaattaaacttcagtagaattaaaattaatttttaaaacttagttttgttaataatagagcagcagtaactttcaagctaaaactcattgttttagtaagtaaataactgatttcatgaaatgttcgctgtcaatgtctggtatgttaatatacattaatcaagccgggtcctgaaacagttttaccaaaat

SEQ ID NO: 397 - DNA, 367 bp, Homo sapiens; identical to SEQ ID NO: 226

SEQ ID NO: 398 - DNA, 268 bp, Homo sapiens
  misc_feature: n=a,t,g or c
attggaatattttatttacattttatatttaaagagaatcaatacaaattgggacatatttacagcatttcaaatcagtgtacaagaatgcaatggtttcatccattcagcaaacaaaaatacatgtctgttttatttttgcctaaattctgctataatttgaacaaaattctaaaacaaaagccacacagagtacaaataaagtgcatttttaaatagctctatttaactttggnggatgaaacttcaaactntatattaaggggcc

SEQ ID NO: 399 - DNA, 450 bp, Homo sapiens
  misc_feature: n=a,t,g or c
aataccattttgagagtaattttaaagactaatgcgaaagttcgggagcacattgtatatttgaaataagtgtagtgtgtgcaaagaccattttctacctgtggataaaaatcaattcccccaaaggcctaaaagcatgaacaatgtttattttcgagtaaataattaaactacatatttaacatggaaaaaattaaatgaatgtcaaaaccaaaattaagaactataagcaaagcatgcagtctctgttaacaaaacttagttgtgaaactacatttttcattttgtaaatgccattatttcatttcataaaatggtaaaaatcctcagtatcattctttacacttgatgcggcaaacacttcctttccctattttcctcggnatttcctgcaaaataaatctaccatctcaagttccntaatggttcatactttcttctcaacatatt

SEQ ID NO: 400 - DNA, 320 bp, Homo sapiens
  misc_feature: n=a,t,g or c
cctttttcttaaggaatccattcatgttggaagcccagattccctaacatatgcactagtggttggctctgggaagtaacagtcaccagagtctggaagttcttcgcttgaactttgagtagccactggtactattggaagccagatggccanggtattggnaaatgggcaaggggaaatcccaagctgggctcaagagccgtgggttagggaagaagaaggtcaagtggactggtaaaaattctacttcaactgcccttattcatagatacaactttcctaacagtctcactctccaccagtcccatatccacaaccca

SEQ ID NO: 401 - DNA, 232 bp, Homo sapiens
gccagacaatctttttattgttcactgaaaaatgcaggtctgcaaagagtcaattgcattgtatattgaatgcaaggtctgatattgcaagtatatatgacatggtataacatataaaatattacatattttacacagtgacagtacccgcctcttctaaacactaaaatttaatagaatgaagtaaaaagcctattaaataagaaacaaacactgcaatcataaacaaaat

SEQ ID NO: 402 - DNA, 527 bp, Homo sapiens; identical to SEQ ID NO: 236
  misc_feature: n=a,t,g or c

SEQ ID NO: 403 - DNA, 610 bp, Homo sapiens
  misc_feature: n=a,t,g or c
tccctttctccctgtttccctcccttctttccttccttccttccttccttccttcttagaattcactgaagtatttcctaggtagccttttacttactactttaatcaaagcttatctttgtgcccaatgtgtaaaaagtgaaaatgtctcttcgaaattctatattacaatatagacagagaagttgggccttgagggcttgagtttcacttaaatactatacacatgtggtatcacacaaggtggagggggagggaacaaacagaaacataacaattatttttattctgtctttacaaaagaaagcctcttctctatgaaaaagtctttttggcatctgctcccggaaacctgccccgagaacacgttccccattgctttgcaagcatctctttttaaaagcacancactgtccccgggagtcacgtaggttggattaanctgtcttagttgaccaacgaagaancactggatgagttttccagggatgantggttgtctggggtggaacatatagtcctgtctacaacaaatgtaactcctgatatgggacnatgaacncagtgtgtgacccaggagtgnttgatctgtnaacantcgcatgnaatt

SEQ ID NO: 404 - DNA, 195 bp, Homo sapiens
  misc_feature: n=a,t,g or c
atatcaagtgtnttttattttcacaaatattttaaaatgcagctacctttgagccacaaaaggaaaaagcagtattccttttatgtatttgatacaaatattaaacataactcagttttagttcattagctcagctcagtgaaaatagctcaggaaaaaaaagtcataggtaatgctattggtatatgcaggaaa

SEQ ID NO: 405 - DNA, 399 bp, Homo sapiens
  misc_feature: n=a,t,g or c
ttttttttttttttttcaatcaagnttttaatgaaaagatcataaaataacagtttcttatccgctgtacatttaagactgcacacttctgaatggagagatcagtcgttggtgaattgcttttctatgacactgggcagctntntagctcaagctctgacctgantttatacaaactctcaagggacatgaactcaatntgacaagtgacagcggcggtggccagtacaggagtgcgatcccggtntccctccccccttntgggaagggcataaaacaaaacatgatccctnttccagttccaattaaacaaaacagctntaaccccntccctnccccntcccnttcgagggnttttgcgaggaattgagccagtgcccaacctgggggtcccccccg

SEQ ID NO: 406 - DNA, 330 bp, Homo sapiens
  misc_feature: n=a,t,g or c
tttttttttttttttttggctagaattgcatcgtaacagtgtggtcacactggntaagaaatgcagattggcaatcatgtacatctctgattaaaacaacactcacataaccaacacaatttgctaggccaaagtcttcacgggcaatccctggggtgggagtctgggatggggtggataatgaaggatacctggggttgcagaagtggggtgggaatccctggggcatcagtccacaggaggttggggccagcgatggcttcaggggtgatatttccaatatatatcagccctgggcacttttcgccctgctgctcacagcatggtcct

SEQ ID NO: 407 - DNA, 296 bp, Homo sapiens
  misc_feature: n=a,t,g or c
cttcacttttatttccattttaacaactagtacattatccttggccttaggaaaagcctccatcagttctatgtgttcccaaaatataagctcatgtgataacgaggtcaggcaattcagttttttaattcataaagtgcattcttcagacagcttcaaataatgtctaattaagtagccactagaagatcagaaattattagaatggactacagctatgaaaactaataccaatctcttaaattcaataaacaaaaattaaataccnttagggatttaggttacataggttttta

SEQ ID NO: 408 - DNA, 267 bp, Homo sapiens
ctatttcttttttttttcctctttttttgtttttgtttttttgcaaaactaattctttcactttcctgtcataaaatcacctctgaaaacacaacttctttacaaaaaagtcacgaatgacacgaactctcaggaaaacacatttctatggtctctggaaacacctgtaactggcacccaggtggtcactcacctgggggagggggtcagggggaaatcacctccaaggacagaggagaaataccagcccttatttgggcgaaaagc

SEQ ID NO: 409 - DNA, 301 bp, Homo sapiens
  misc_feature: n=a,t,g or c
ttttttnntttgtggattttccttttaatgcaaaatgttgcaatacaaaacaatgtggagaaagcctgttcctcaggcactgaagggaggagtgaggaagagaggacagagctggacgtctcctcctatttctccctccccaagtcactctgaggggaagaacactgctgcctgctccctgggcctgccgcatacaaggttagagccctgggtctggggcatccttagcctgaaatttgttgacatggggcaggagagcaggagggaacattgagggttttgactcttcgggctctaaaag

SEQ ID NO: 410 - DNA, 289 bp, Homo sapiens
  misc_feature: n=a,t,g or c
aaggngttgngattgctttaaagaaagctttatttactacatacatcctaagaatgtactgtaaatggagcaagatctaaataaaagcttttcaaatataaagcagctaaagttaactaaaccactagcaatgtttgaaaacagaactctaaaactttttttttacatttatatagtttgttcttaacactaaaaaaaaaaaaagttcacatttcaagttataaacttaccctcaggtaggtgtaccatggaaatgggttttggaaaccataggggnccaggtaggccc

SEQ ID NO: 411 - DNA, 329 bp, Homo sapiens
  misc_feature: n=a,t,g or c
ggtntttaaataaattttattgtctatattaaggtatacaacacaatgttaaatgaaacatatatatatatatagtaaaactatagtggaacaatgaacatacccatcatctcacatagttactgattattcccccattggcaagagcaggtataatctactcatttagcaaaaagtcctgaacacaatatacaatatgtattaactatagtcctcatgttgtacatttgatctttgatcttttcacttgttcatcctgcatatttactactttgcatcctttgacctacatctcatttcctccaccttatcctgaccttagtaattac

SEQ ID NO: 412 - DNA, 308 bp, Homo sapiens
  misc_feature: n=a,t,g or c
ctgtcacttctactgtcaagatggttgagagttgacagtttgtctagaagaaggctgatatatgtcaacatggtcagcaaaggatttaaatatgggtctttgaataataaatagctaataattgagtttattaaaatgaatttttgtataatttaggcagttgaaggtctagaacagcctgcgttcctttctatggcagcttgctatgaaattcatgtttcaaacaaaacaatactttttcatgcataggataaattataaatgtactgaccnggcccattctatatggttaattctnacgganttta

SEQ ID NO: 413 - DNA, 251 bp, Homo sapiens
gtagagatggggttttgccatgttgcctaggctgatctcaaatccctgggctcaagcaatccacccacctcagccttccaaagtgctgggattacagatgtgagccaccacctacagcctggccaagaacccttttctctcccacattcccctgggagcagaggataggcctgatgattgttttaaacagtagaaagggttcagctaagaactacagtccactctcagccctgtcatgtactataggacaa

SEQ ID NO: 414 - DNA, 432 bp, Homo sapiens
tgcagttaagggacgtgttttatttcatagctttctgcaagcaaaattgctctgatacaaaatgagttcaatgatacaggtgctactgtccactcaagcaaaagaaaacctcacatgtatatgaacgcactttatacttatattcttacagtataataggtctaatatccaggatgcctctggctcattgaaagcaatggcagagaaatgctgcaaggtacttgaatatcatagtactggcaagtgcttgaagtaacttcctgtgagttctctgtcagatactgcaaagactgcgtgtgggtgtgtttgtctttttgtcttccatcttttggtttacatttaaatcatctcaaaaaatatcccctggcatgtatcattcagcttctcagagtttccataaaaacaggaaaatgtcatgaggtatccctaacg

SEQ ID NO: 415 - DNA, 292 bp, Homo sapiens
  misc_feature: n=a,t,g or c
caacgcctttattaagaaatatcaaaagttgattacaggtccatatgcagttttacaaagttcaagtgaagaagactgtagggatgccatcaatgtgcgtgtctgaagactatggaagcttgtcaaaggggtaaccctacaactcctgtcactttaacantggtccacagcaatgcttttcccccatttctactaggctaggccattgcacaataccttaagctacttaaaagagttttaatacgttataaatacgtacatatttgtccttctagtttgttaccatccttcc

SEQ ID NO: 416 - DNA, 258 bp, Homo sapiens
cagattttcttgctttaattcttctctatattaccacagtaaaatatttaacaaagtccaagagattactgatatgcaataatgacctatgactttacattaatggagtgatgtatcaataataaactgatcagttaagtaactggaaaatgtttgcatgtaaagaatgattcactatcctttttatcttgtattgaaatcgtcaaaacatttaaaaacacaaagttgaagtaattttaaataataataactgtgaaa

SEQ ID NO: 417 - DNA, 394 bp, Homo sapiens; identical to SEQ ID NO: 98

SEQ ID NO: 418 - DNA, 444 bp, Homo sapiens
  misc_feature: n=a,t,g or c
ttaaaaatactcctttttgtaagtctttattttttagttgctcctcccatagtaatgcactgaaaggcataacagtttatattgtacaaagcatttgaagaaagtacctcaacttgctgattatttcaaaatgagattacaaacaaaaagaaaacaaatctggttcctcaataaagggcaaaataactgaatacagtctgttatttacttctctcttttaacataaggttgggaacacttcattttacaaataggattaacatgaacataacatcgcacaagcttgcagacaaccagcataaaatatggagtacagtttttaatcagaagaatcatgcttccatgaaagaaattataatcgtttatacaattgaatcgatttcagtattacaaaaactaagttgcatctattcgtatttagttcattaagaaggaaaacnaaac

SEQ ID NO: 419 - DNA, 381 bp, Homo sapiens
aagtattgttaacaatcctttggaagtcactactggtctttgtgtgctgctttttaataattgagttattttgagcttgccaagtaggatctattgcctggactaaaatttatttcctaatcttctgatgaccaagaaaggaaaaattaagtttgcagatgtgagatgaaatatagccagtgaatatgcatactgattctgaatgaaaggaattaacttttcagtcaagaaacagtctgcatgcagtaaattgaatttttcctgcaactggaatgatttgtttaattcttctttgaacactgccctttctccagtaagaacactaatgatttgctaatattttttaaagaaatcgtttttttaattagttaagctcagact

SEQ ID NO: 420 - DNA, 292 bp, Homo sapiens; identical to SEQ ID NO: 123

SEQ ID NO: 421 - DNA, 427 bp, Homo sapiens
tttaacaggaagaaatatgccttttattaggagttgcatatgtacagagaaagctgtttctcacagctcaggggaggctgtgagaaagagccactgtcatccaaggtcactgcgcgtacactggtaacaccacttagacaccgccgcacgtgattaagaaacagaaccatgacacagaaatgcagaagagacacgggtacgtgtgtggacacatcatttctaaaaacaagtcaacacaaaaatacaatgtgccaataaaaaaaaaatagacatatccatacatgtctttttttctgtttttaaagtaaatacatggtatgctgagctttcacctccagctttttccacatcgggattcacaggcactttagcaccccagccatggtttacaatacaggatgttcagaacaatgaaggaagatgggag

SEQ ID NO: 422 - DNA, 451 bp, Homo sapiens
tttccacaaaaatgtaatatacatttaatagcacattataaagttcctgaccaaagacgttgatttcctaattataatagcacagaaatcctttagaatttagtaaacgtaattaagactattcagaagtaatgaaaaaccaatatgataaaaacaaaaatcctccagtaaagaaggaacctgtccatttgagagaaatacaattgagaacttgcaaatgagacaagggaagatggcaatttggaactgcaatagaaataactatagcagaaacaaccatttaagaagttttagcagcaataagtatttattattctgaatgaaatgtacagttgacttttatataaaaatcatcaaaagtgctatattggattattttactattaatttaacccccaacagcatctattagctataactttaatgggtttttctttacttctgatacatc

SEQ ID NO: 423 - DNA, 489 bp, Homo sapiens
ttttttttttttgaaaggaagcgagtaggttttaattcaagatacaggcccctcgcgttgatctcgtagaaggaaactcagtggactgacaagctcaagtcatgtatgaggcacgtcctgggacccccacccctcctgccataggaaggacagctttgggcagagggaaggaggtttgagatcagggttgggcccatacagattgtgtgaggtggtctcaagtacaaatacttatctgaggctcctgaacaggccagaaattggtgagtctcaagtaggtgtctggggaaagagagggaaggggcctgcctccgctccaggggagctggtcgccgtttggcaggcctaacagacctctaaggcacagactggtagcaggagagagctatgtcctgtactccagatgctgggtaaggagcagctggatgtgctcagatggggctcttctgagaaggtggaggtaggagagagggcagaagagagtaagcc

SEQ ID NO: 424 - DNA, 439 bp, Homo sapiens
ttttttttatagaatctagcaattaccaagacatttattagttgtcaaaaagctttacaatcagtttcatgatcagaaaatagagcaaaatttcaatattgttttctttataaaattgatgaatttctgaaaagataaaggatcatttgatttttaaaaatgtcagcttcatcacatgatgttccagagatctgaccccaaaagcttctcaagttttactatccatagtgtccttatttgtaactgagacccatccgttattttccatctgaagcttcttcagcagtttataacaaagtgaaagaagttggactaagagagccatcatggatcttgtcttcgtaatacacttgtcaacctttagaaatactttattctgcaaagaagtcttagttactgtctggagctggtggcatagaggaattagcttgtttatttc

SEQ ID NO: 425 - DNA, 378 bp, Homo sapiens
  misc_feature: n=a,t,g or c
ggatnagantttanaggcaagacatttattcactcatgatatatcagtgcaaagtgtgcctacagtatacaaggtaaactcacaactcatcaaaactaaaactttttacaatgtgcaatacatgtagggatattaattcaatatataaatgtcacatgtctcccaaatgtcacccaggctttctgttatttcttaaaatatacaagtcaatattaccagagaaaagataagaaaatcccattattttatcctaaacttatgtatacttctctaaagattcttagggcttgtaagcaatgaggtttaaggcnattttttaggatgttagcatcccggggctgacttngccgggctgtgggaaccccaggnccggagtgg

SEQ ID NO: 426 - DNA, 476 bp, Homo sapiens; identical to SEQ ID NO: 206
  misc_feature: n=a,t,g or c

SEQ ID NO: 427 - DNA, 404 bp, Homo sapiens
  misc_feature: n=a,t,g or c
aacaagtttattttgcagttaggaaggtaacagggtagggcatggttacatgttccaggtncaacttcctttgtcgtggntgattggtttgcnctttatggggggggggtggggtaggggaaagcgaanagnaagtaacatggagtgggtgcagcctccctttagaacctggttacgagagcttggggcagttcacctgggcctgtgaccctcattttcttgacatcaatgttattagaagtcaggatattttttagagagtccactntttctggagggagattagggtttcttgccaagatccaagcaaaatccacgtgaaaaagttggatgatgcaggtacaggaatacacgagggcatagttctcatagtcggtggccaggatccagtacggtnccnatgg

SEQ ID NO: 428 - DNA, 428 bp, Homo sapiens
  misc_feature: n=a,t,g or c
aanttacnttttagccaacttttatttttatgcctagaaaaatacatgggacgtttaggactaatgtgctgggcaatttgctacttagtgatagtaacacaatcctgaaaaggcaagcacaattattctgtactttttaaaagttttattcagcaataagaccataatttttcatatttaaggagtatgaaaaatttgtggagttttaaaagctgaatacatgtagcgttggatcaaggcacatacaagactggccaaagggcggtacaatgcactttggttttttgttgaaaaaaaaaaatcatgggcaacagaaaagtgatatggtttttcaacaagtaacagctcacaattcagtaggaagctagaaggaaatgttacattacgagttcnttatataatatccgggaaatttgtgacagtaatgt

SEQ ID NO: 429 - DNA, 396 bp, Homo sapiens; identical to SEQ ID NO: 224
  misc_feature: n=a,t,g or c

SEQ ID NO: 430 - DNA, 447 bp, Homo sapiens
  misc_feature: n=a,t,g or c
aactttactcataaaattttatttgaacaaaacaatttttganaatataaaaatttcataagaactgctttcctgttagatacaaaatttattttaaaaataaataattatattgacctttaccatcacttgtctaaattttactcatgtttattgtgaagacacagaggtgaattagaagagtatatcattatacattgtcaaataaagcgaaggtttccttatccaaatagagagaatatatatgtgattacttaatataaagcaaaagctatttctaccaaagaacagacatgcagttattgatctggaattggcatcgattacaaactactctngcaattcttcctctccccaattaaggtgtctctcttgaactggattgaaagctgtttgataagtatacttttttcaagatggtgtgcncagttggggggccttttatta

SEQ ID NO: 431 - DNA, 268 bp, Homo sapiens
  misc_feature: n=a,t,g or c
ttttttttttttttttggcccaaagtaaacatgtttattctcagttctgccttaggggtctctagttttgcaagcatgagtaaatggantcaacaataatcctctccttaaatgtctggcattaaaatttgtcacttaagaagtttcctgttttgcctaaagagagtntgatttgagggtgacctgaaacaaggcttgaggcttntggacacatagggttaatcgccttatttcctgccaaatcgcagagcagtgaaaggccaaagga

SEQ ID NO: 432 - DNA, 261 bp, Homo sapiens
  misc_feature: n=a,t,g or c
agtannataccacagagaatagttgggatgaaaggcatccagcccctgcttcctttaagatggcctctaggcaggtgggtgttctgtaagcctggcaaaaattctggagccaatctctggcaaggctgagtgccaggcggggcctagggacccagggtcggtgcttaatgcctcccgcccattggaaattactgacctccaaatatatatatatatatgttttttaatttaaaggggaagtacactgcacaccttcctcca

SEQ ID NO: 433 - DNA, 385 bp, Homo sapiens
  misc_feature: n=a,t,g or c
naatagaaatgattttttatttactttgatgattagggaaagataccaacatagctttcatcaaagctaacaaataactttactggcagttaactaattttattagactaaagacatgtctgtttaaactgaaacaactggccctttgctttggctgggaccttgggaatcacggccaaggtgctgatcagaaaagagtcaccattacatcaacctcctccccagcacacagcacagagatgccacgaaggccccatagggtccctaggaagagcagctgggggctccacctaccgaggtcccagtgggcttattttggaaaaggatttgctttccacagggtagggtgtcgcccgaggtacatttcttgaggacttgcccttgg

SEQ ID NO: 434 - DNA, 384 bp, Homo sapiens; identical to SEQ ID NO: 277

SEQ ID NO: 435 - DNA, 566 bp, Homo sapiens
  misc_feature: n=a,t,g or c
tcctctccgcgaactngcaccaactttatttgcaaaaagaggctccaagcgcacggagaggatgggggctgcaaggtccccaccctcctcccggcctcccgcggctcctgccctcctccaggccccccacggcccccgccccgcnagctacacgatcccgaactnggcacnctntanggcagctgatcgcggcagctntgctcgaaccacttgccgttggcgcgcctgacaggaccgcgcagttctcggtcttgccgccatcgggttgcgcggtgatctcagtctcccagttcttgtaggcgatgcgggcgccggtcatgtccacccaggtgccctcggncgccatgtcgttgaggcccagccagatctcggcctcgttgcccacgctctggcgcaggtactcatacagggcgtcgttctccgagccagtctgaggggtgctcagggtgccccgcgcgagatgcagttctcgctgggctcgtggaangtcttcgtctgggtgaaggcagaaagcattttatgtgnactttgggtcccnttnagggaanacgtttgaagggctgctg

SEQ ID NO: 436 - DNA, 446 bp, Homo sapiens
ttttaaaaaaaaactacatctctttattgcagaatttatacttgtttgaaaaatacaaaatgtagcgttgataagattgaagcatgttgaaaggtaagtacagggaaaggtcctttcagaatgactgcaacagtgcagcaaggattcccattccccgcctaaaggacaatacctttttaatagaaataaatgagttagttagttagatttttattacagattgaattaaacagttagttacaaagacattctctgatacattcattcatagaggtcttaacgtataaatacatagtaaatatcctataaaatcggtaggcaatctcatcgtgcattatctttttgtgctcagacttggacttcacattcagtctctacatacagcttgattagaatcataaaaacaatatgaagacgattgcataaaggggatagtttgaccaaag

SEQ ID NO: 437 - DNA, 106 bp, Homo sapiens
gcaggtcagcaacaagtttattttgcagctagcaaggtaacagggtagggcatggttacatgttcaggtcaacttcctttgtcgtggttgattggtttgtctttat

SEQ ID NO: 438 - DNA, 462 bp, Homo sapiens
  misc_feature: n=a,t,g or c
cataatccaataatatatttaataggtaagatctcattcatcaatatacaaaaaaaaaaaaacaaaccagaaaacaaaaaactaactttgattaagacatgtgcccttagtaaggnnctttacaattagaaaggtttatcggtagcactttgaggtagcatattttgtaaagtcacagggctgctctgcagtttctcctggatacaaaggtagaggccatcagcctttgcccctggaagaggaaagtgaaattatctgtactcattgccagtgtcagcctgaacacactttctaccacccacccttggccatccctcctctacactttatgcgtcgggggtttagaacaacgtaaaggcattttgctgcttctttcctcttggtacggcagcatcccaggctgtggagccagttgcctcttgccgcatgtgattcaccagcaggagacgcatgcaccctgtg

SEQ ID NO: 439 - DNA, 319 bp, Homo sapiens
tttttttttttttttttcattttcattatgtagtttttattttagacgaacattattataaaaaaaaagttcacctggaataaaatccatttaaaaaaaacatagcatcagtatcagtacacagttaatgaattggcttaaacaagattaaccacatgacaggtccacttatctgcaggagcttttcacattaagccattggagcaaaaataaaatatgtttaaacatgtacagtaggatagttatatggaaaaactagagagtttccattaggggcatgattttcatcaaaagtttatggtattttgcatgaaaggaa

SEQ ID NO: 440 - DNA, 203 bp, Homo sapiens
ttttttgtgataacagatcaattttaattctagcacctgaagctatacaagggtatgctctataaacttcatgggactgttgtacacacttgataaagtgacaactgtgcaataccacttagcatctcaaaatcaggaacatactattgaattgcttaaacacaatccacagaattaaaaacaaaatcagatgccatccacag

SEQ ID NO: 441 - DNA, 309 bp, Homo sapiens
  misc_feature: n=a,t,g or c
ccccgtttaatatttatttatttaannttcataaacagngcactgcacctccagtgttcatccatggcactttcatgaccgcttcctgttctgtggcntctnttagtgccaagttgnatcacatttcttgctgaagttcagacaattgaaaacaaacagactcacatcctagggaaatcaacagaccaacaatggcaaaacacaatacaatgaaatggaaaataatgtttgttacaggagtgcagcaatttaagaagagtgtctcaggagtgtggctcactgggcagctgnagctaatgttaagtgctt

SEQ ID NO: 442 - DNA, 281 bp, Homo sapiens
ttatacttatgattagttttattataaaggatacaaatcagctccacaagccaaggaagacacagggaaaggtctggaagggtcttgagcacagtgctcccatgccccctcttcgtggaattagggcacactgccctgccggcatagccacagcttcaccacccaggaagctatgctgagctttagtgtccagagtttttattagggtttcatgatgtactgattaaagcactggccagatgattaaactcagcctccagtcccccgccccataggtcagg

SEQ ID NO: 443 - DNA, 284 bp, Homo sapiens
aagcttacactgagaatttattggagggctttgagacagctcatgtaatggaaagctcttaagaactaggtttagaaggtgcagagaccagggcaacttcagggatccaggtagcaggaaggaatcggtagcctctttggtatggccactatggtggtagacactgtctacgttgtttgctgagtcttctggctttcttccactcttcctgctcttggacatcagactccaggttcttcagcctttggaatctaggacttgcaccagtgggttggttgccaggg

SEQ ID NO: 444 - DNA, 273 bp, Homo sapiens
aatggctattaaggctttattgtaagggattacagtaaaagatattctattgtgcaccatgcaagatgcagaaaataatggtttacaaataatgttaagcaaccaaggcaataatggttttcctttcattctggttttcccaaattaaatttttttttttcagattaaaatcaggtttggagttaacagaaaattgcattcctaacttaaaaacttcaacttctctagattcctttagaaaaggaataaatatagtttaaaaaaatgttgttt

SEQ ID NO: 445 - DNA, 445 bp, Homo sapiens; identical to SEQ ID NO: 133

SEQ ID NO: 446 - DNA, 425 bp, Homo sapiens
tgggggtttttaaggtgccgcatgttctttttagtttccatacatcgtctgtcccagagtgaggagaagttgatctccttcccacatccaccggaggctgcgtgagggaagcctggctccccacaacttgctccttctccagccctgcccctctcaattaaaacaatgctttcttttttcttttcttttttttgagacggagtcttgctctgtcacccgggctggagtgcagtggcgcgatcttggctcactgcaagctccgcctcctgggttcacaccattctccagcctcagcctcccaagctgctgggactacaggcgcccaccaccacgccaagctaattttttgtatttttttagtagagacagggtttcactgtgttagccaggatggtctcaatctcccaaccttgtgatccacccac

SEQ ID NO: 447 - DNA, 400 bp, Homo sapiens
caggattccagattttattttttagaagattgaaaaaacacacccaggacaacatttctttgatcaataaactttcaggaaatggaggaagctgttttgggacacattcaaagctagttaacttgaacttggaaatagggttttgacaatccaactatgggaaacaaatctctgaacaaattttaaatgaaacctcacccccccaaactgttcaagtggcagacaaaataaattaccataaattatatgccaacacaccttttaaaaaacaacaacagcaacaacaaaaacccaggagtctgaggatttccttagctcctccaggaagtgtgtaacactgcttctggcctgcaggctggggcggatcagggacctgtcacacgtcaggatagttgcagta

SEQ ID NO: 448 - DNA, 470 bp, Homo sapiens
tttttcacaaataaaccaactttaatagatattattttgtatttatatagtgccttcttcaagaaccttaaatgctttacagacattatctctaattaatccccacaacaaccctgtgaggtaggtattactcccattttacaagacagggagactgaagcacagagaggttaagtgacttgcccaaggtcacacagttaaattcactgaagagccaggacatgagcgctttacctcccagctcccagccaaatacctcatgatagaatctttaataaaaagtgtttttaaagaaagtatcaagagtagttatgttatgaaaatgaggtctttctactgccatcaaggaaagaaaaaaccctatactgatggttagaggccccaagacccacataatacaacatttccctctttccctgttcccaagcctcctggttcctgtcttaaataatcttttaaaggtaaaattt

SEQ ID NO: 449 - DNA, 428 bp, Homo sapiens
gtttgtaatcaatacatatttattgagtgcctactgtgtgccaggtgcaccacactagatgcaacggatactaacagtaaataagatacggtccctgccctcagagcttacatttcaacagtttaaagtgcatctcaggtatttcagataacagaagtaattctaccactctcaaatttttttttttaatgcaagacacaacacaatcataggccagagttataaaatacaatgttagaaagaaacgtttggtatcattcgtccagatcccattttacagaaaagaaactacaggagtggccatttgcacctatgttctgatttcaagtttggtgttttacccattgccaggcctctcataaaacaatattcagatttgccatgtatatatcaatatccaaacgctggtagtatacctgtgcagttgt

SEQ ID NO: 450 - DNA, 425 bp, Homo sapiens
tttttttatcacccagtgtgaaaagcagattttatagtataaccgtttttaaatgaggggcctaagagagggcagtggctggttagtcctatgttagatattaacaaatacgtgtaggctggatgtggtaggtgacgcctataatcctcgcaccttcagaggccaaggtgggaggatcacttgactcaggagttccataacagcctgggcaacatagagtccgtctcctcacaaacttccattcttggctcaggtattagagtcaggtgccacaggtatataatgaaccggcagatctggagaggactgcggtgactgccccctcctcctcttgcacagcacataggaaagggctgcggtgaggatgaagatgatggccaggaggcacaggaccggcactgtggctgatgtcctggctgtgggac

SEQ ID NO: 451 - DNA, 302 bp, Homo sapiens
acggattataaaagttatatttattcacgatgctacatttattgcattcccttagaaaaatggagaactgtttatgtacccaatctgcacatataaaattttatacaaattatgtgtagcacataaaggcctctggtacagctaaaatcctgacactataatttgggtattcctgctttagggtctccagtttatcaggtctgtccatagaaaacagaaactggaattatagtcagtcttgctaacacttagaaactactttaaaatacaataaaattttcatttaccctaaaagtccaaat

SEQ ID NO: 452 - DNA, 260 bp, Homo sapiens
cacattaaattatttattgaacaaattgaagataatgacatatgtttttattacaaagtcttccatcatcttatatcattgacacatattatgagacctgcatttgaagagtgaatagaaataagaaaatgttttcccaaccccacaaaaacagaaaaaaatatattaattttataattatcttataaagccaaaagttttatgaattatactttttttattagttaaaaatgacagcataactaaggttaatttttatt

SEQ ID NO: 453 - DNA, 544 bp, Homo sapiens
tttttttttttttttttttttgaaaagaaaatcagattggtttattgcttctgcttgtatacagagttgaagagcaagtttgagtgagtgcctggagtgggcggtggatgaggggaattatggaagggagaggggttcctcaagtctgttattttttaagagatggggtctcgctgtgttgcccaggctggtcttgaactcctgggctcaagcaatccacccatctcagcctcccaaagtgttgggattacagatgtgaggcaccgcacctggcctcaaatctgttcttgagcagtagagaggaaaggagaaaggaagggacccactggctaaaataaaatacatttttaagaagggcaactctcagtgagtggttgtgatggccgccctgctagggctcttccctcgcctcctggagctcctcccttcatcctctcctgtattgctgggcccagcctagtgtggaagaagagtaaagctgagctagaagtattttctgctggtgccccaccaatttaaacacattaaatttggagtgtagttc

SEQ ID NO: 454 - DNA, 342 bp, Homo sapiens
tttttttttttttattatacaaattagtagtttatttcttcctttagtattacagttccaaaacgtaacttgaaggtcagcacaggagctgctgtgatataaaaggagagagtcacctggcgccccctgcagtcctccagttgcccagcagcagtgggacgctcagtggcacacagtgggtctctgtatggcctcccacctgcaagggcttccccgggcaggcccagctgccagaagccccggaacacacaggaagacaacactataggatggcaggtggggatctgtgcaatacaaacatgtagctagaaaacccaaccgaggatctgtctagaatacttc

SEQ ID NO: 455 - DNA, 336 bp, Homo sapiens; identical to SEQ ID NO: 155

SEQ ID NO: 456 - DNA, 412 bp, Homo sapiens
ggagacaatgacaacggcagccgccattttattgccaatcagccatgagccccgccttccatacacaatgacatttcatccccacaatcgattaacacaaccatgatagccatgaactcccaactcctccagctgctagtgctcaacgggagagtcccctccaggtctgtctcattgcagagcccatattctttctgcccggccagcagttactctcctcaatgagcaggcactggtgcagtcttgggtgggcaccagtcacccctatggaaatccttgatggatgttacaggacaggattggatgtgaggggtcttggaaatggggctcaagaatcttcatcatgaggcgtttctgcgcctactgacctgagatacagagaggaagttccatggacaccaacacccagttc

SEQ ID NO: 457 - DNA, 320 bp, Homo sapiens
aagcgaacaatttgttataatgaaccagaaatacaagattccactgaaactgaacagttgacagaatatggttgaacttaaaccttcaagggaaacaagggcaaaacaaagctaatgagtggaaaagtccaagattagtttgggataaacatgaggatataattgcattttagcatggctatcttctgacctcttccagcagttcgtctgccatcattctcccttctgacacacctaccaaatcaaatggcttctgatcctctatattgcagtataaaccaaccctatagtacccctctggtcatgatacaaacccagaa

SEQ ID NO: 458 - DNA, 306 bp, Homo sapiens; identical to SEQ ID NO: 169

SEQ ID NO: 459 - DNA, 460 bp, Homo sapiens
tttttttttcagtgcatttgccatttttatttcgctatgcagaaacatacattcaccatgggctgtgatgcaggtgatcgtgtaatggagaatctctctttttgaaggctatttataactaacactaaatagttttaattacagtggaaattctgtacagtttaaggcttggctctgaactagaatgtaaatatggaccagatttgaaaataaaacactttcttttcaagtaaaagaagaaaaatcaattaaaaaatacacggcacggaaaaagtaactaagaaaacaaagccacaggaagcccagcagtttctcctgaagtgaaatttcataatattgtaaactaacaaaaatacaggttttcttcccaaaataatgacaatttaagctctctggattgaacacagaccaaagcaaacaacaaggaagaaatcgcattaatatgctaaaatcagtacta

SEQ ID NO: 460 - DNA, 425 bp, Homo sapiens
ttttttaaagtcttgcgtgaccacagactgccctttatacagaaagcagagtgaagcttcaaaagtaactgccagagaagtttttgtaccaagcttatgagtggatgggagtgttacttttctttaaatgaaaaatgctgaccaaagcctaatcggaaaaaaaggaaaaattaaaaataaaaacaaactgaaggatatatgccaagataaaccaaaattaatacagtgatcacagcacagttcttaaacaaaagtggcatacaatctaaaaatatctctttttctagaaatactattatgtaatctagttcaattatggaagcttttctgtcctgactctaaactgtctcctttattggatactctaattgcagtggcatacattcattttttttttgagatgggactcccttccttctgtagct

SEQ ID NO: 461 - DNA, 483 bp, Homo sapiens
tttagaagtgaaagttgtttttattgtttatatattatcaagcaggcatctgatgacctgtggaattagaaataccagcagacatttccaaggggtaggtgcacaggtcaacagaactaaactacagtgatcttcccttagatccttttctactgaggtgaatagctcaaaagacaaggatgcctttagtccaggctaacccctgtagcctctacgcaattaacacagaagaaaggccttcctcccttccagcactggggctcaacagtggactgagtgtttggtagtgtacatttccaatcttaatagagcaaagccagacttctgctttgatgactgagctacagggacaggagtggtccaaggttctcaaattctgtttttgtttttttccagacttctatactattgtctgccctaggctgtagggaatgctggttagtttgctgaacagacactgtgttcagcagggtttgtggtatc

SEQ ID NO: 462 - DNA, 208 bp, Homo sapiens
  misc_feature: n=a,t,g or c
gaatttcactttagtttttattwnattgtaaaccattgvgatggaatgatagggtttcccagaatcaggtccatattttaactaaatgaaaattatgatttatagccttctcaaatacctgccatacttgatatctcaaccagrgctaattttaccyctttacaaattaaataagcaagtaactsggmtccacaatttataatacctg

SEQ ID NO: 463 - DNA, 400 bp, Homo sapiens
  misc_feature: n=a,t,g or c
ncccttgactttatttatcttcataagncacaaaatgtgagtgcagagataaatgtctgtgtgcatgtgccctgagcaacagggtggcataactcggcacactcataatgacacagccgttcacccagccacagntagtgacagggcacacatggcgacacccacatgtacggngntaantctcccccaccatgacatgggtagacagaaaacacgccgcagtntactctagtntgtttacacaaacngggagacaggcccgtgcantgcatgttcaccaacacccacantcagngtgacatctgctggagggtgttcaggacacaggccacccaccgtggacatggccgagntttcacatttnttcacatggacacgggttggtttgccactttcantg

SEQ ID NO: 464 - DNA, 341 bp, Homo sapiens
  misc_feature: n=a,t,g or c
gtgtttcagtatcactttaattgcagtatttaancacatcactttgtattcagaaaaaatatctacccaatactctctnctctggaaattnctatttccaaccgtcattgaaaccagggnccctgctcaacccctctggnaagnaatcaacagcaaacaaggncctgggtcacccacagaagaggcagctggttgataagggttaggngctgatctgggctatgaccatatgggggtgcagagcaagggaaggggctcagggtgagggaggcagagacagaaaagcatctgttgggggactgagggcaacagctcaacccaggggttcggcaggagggngg

SEQ ID NO: 465 - DNA, 596 bp, Homo sapiens
  misc_feature: n=a,t,g or c
ctgtattatacgttgatacagtacactgccaggtgaaacaagagccttaataaagcatgcatcgcccacacccctgtatgagacccccacagaagggatcgcttgntaaggcaccattatgaaggtcaacagtgcattaacagctagaaaaccagaaattagtcctcaaggcataaataagagaaacatagctgcatgagaaaacagtttctaagcgttagtggttttatccacccaactgagaaaaattttaggttcttaagtctaatgaaacattagaccagcaattcccagccccagctttgtgacactcaatacgtgtccaatttcttctaaggggcatcacagaattctccaaaaagttaattcaaattcagaatcatttnaaaaataatcctgtgttggacaatgcctttctggaaggggagtgttacaaacttggagggggaaaaaaaattgtatattgccaggcccggntggctaggggggtccctgtnttagcagatgggatcttagctgctcattactgggatccgnatgcagtcctgacttaaaatggaaaggcttnagttccccggncatgcatgacttttgnt

SEQ ID NO: 466 - DNA, 383 bp, Homo sapiens
  misc_feature: n=a,t,g or c
cacaggaacaattcttttattgtacattggagaaatagccctgtgtgctggttcaaggtgcaacatacagaatattgaattaagaaaagagggaacggggaagggaanggaaacctctttgaggtccaaagttgncaacaaaaaatggtaaaagatttcctcacgcaaganggcatttttgcaaataccatgcaaaacaggcagctggtgtgccttaagagaatccctataaataacagaaaagacactccaagcattcctgtacgtggactcagagcacagagaaaagaaactaaaatgccttttggatttcaagatatttggcactcttgtgattacatttttttacagtccattaaaggggaataaactgacataatatt

SEQ ID NO: 467 - DNA, 363 bp, Homo sapiens; identical to SEQ ID NO: 209

SEQ ID NO: 468 - DNA, 239 bp, Homo sapiens
ttttcctagaaattggggcagagtacacccatttattggaaaatgagaagtcctgtgtgtgcagagaaattttaaagaaaagatcaggggataatccatccattaagaattctccattaagaatactcattataggtttaattaatcacaatgatggatatctttaacattaggcaataattgacagttttatagtggtgagactatcatcacccaaaatacaatttttaaaggtcata

SEQ ID NO: 469 - DNA, 275 bp, Homo sapiens
taatgagaaaataactgtatacttgcattgaatgcctcacaatcactctaaaaccaaagcaggataataacatttaagtggttaacatacacaggaaaaccagatacagagtataatttccaaacacagtattgctgcttttttcccctcctcccccaaaaaaagaaaaacaaagaaaaaataatttgggtaaagagcaacacaaaatcaaaattggcagctcactgaatgcttaaaattcaggaaatttgttctttaactaaaatggaatatat

SEQ ID NO: 470 - DNA, 209 bp, Homo sapiens
  misc_feature: n=a,t,g or c
ttaaaaacagaagcgcgaccatttctttattaaattatacaaatnnnnnngggaggggggcagctgtggggctcggcaacacccggccccaccccggcctggcgctgtctgagaagaggggatctgagggagatccagggatcaggcaggatagggatggggcaggacatgaggctgggggatgcanangttatttgggagangctacc

SEQ ID NO: 471 - DNA, 423 bp, Homo sapiens
aatgattctcttcctttttcacaactgtgcagtcactgtcctattgtgttctattctgaaaaacaaatttttttgaaggtcaagtttttcaatggcacaaaactatttggaatgaacccaaaagatagcggaaagttgggtccctcctcaagtagtttcctcctcttttaacagcatctaactactctctatcaataatctcatcacagccgagttcttcggtcagacgattgacaaccatcagtgaaaaaagctcttcgataaaagctaactgatcaaacggggtcttctcataatgcatctgaaacccgccatccagggctggttctcttgttctcagaaacatcttgtcggcttcttcaagagcggctgatactctgtagccggcaccactgagctgctcctcttcgggatagtcgtagt

SEQ ID NO: 472 - DNA, 305 bp, Homo sapiens
gtacaaaaaaaaagttttattttgaagattacagaacttgtgccatgaccccacctggcttccattcccagcaatccagggatctgtggtggggatgagagtgagaaaagggagtaggaggggaggagggaggcctggtgggggtggggaagtggagtaacatggttgttgagaagctcgtggccccctaggcctgggctcactgtctttactcctccatactacaagagtgatgaggaaggggatgaggcagatgggggctatgatcatggccaggagtacatcctctggggggtcagagaagg

SEQ ID NO: 473 - DNA, 474 bp, Homo sapiens
  misc_feature: n=a,t,g or c
gaatgtatatatttattataatctccaaaataatttcacttggtacaactgcttcttaaaaccatatcaatatcaggctcagaatttaattacaaccaagcaattcacaaaaacactgagcaacaaaacatgcttaatatttctttgagaaagacccttcaaatatgtgtacagcatcactgggagttacacaaaactgttacaaggtgaccattaagtgccccaattctgcacttctgacatacatgaatggctaatgtaaccacgtttgggaatctttttacatctcaaaataaagctttctgatgcaacttgccatccttttaaattttaaaggatattcttgggtaattccttaggaaagtaaaactacacacactttcagagaaaccaataagctgcttagatttttaaaattttttatattatacacttcaattatggggtatttaattaaagncctccaaaaaaanc

SEQ ID NO: 474 - DNA, 258 bp, Homo sapiens
  misc_feature: n=a,t,g or c
aaagattttattgtcttcttaagtcaatatccctggngaaantangnggataacttgaaactggtgacagtgcaacacagaccttcaggagctgctttgaaggactggcctgccagaatgcctgctgttaagcagcagccccctcactccggcccctgcatcttgacagatggagctgccatggtttcagggacactcagcagggatctgggttggtccctcccacatggaccttgtaaagttgctattcaggggacc

SEQ ID NO: 475 - DNA, 464 bp, Homo sapiens
  misc_feature: n=a,t,g or c
ggtaggancagaatactttaataagataccagtgtcaaaatacattnccttataaagttaagcncccatacagttataatgttgtcagtaggaattcgacaatataataacgctcatgaaatcgttacgttgacaggtagggttaatatgaagcttggaatattttccagtgttttaggtaaaactgccaagggntaaaatgcccttaatgccggggcaacacacacagggaaatcaaataccaggcatttacacgtcgtaaacccttcaagttctggccacccgtgtggggggtaatggccgtgcggcttaaaatatggattttacggnaacaccatggactaggggaatttccttcatagggaactttaaattttctttttgganggctattttctctgtttttgggggcattaggtcttttccggggtttnactaanaggttgggggcccntgtggttttt

SEQ ID NO: 476 - DNA, 469 bp, Homo sapiens; identical to SEQ ID NO: 248
  misc_feature: n=a,t,g or c

SEQ ID NO: 477 - DNA, 389 bp, Homo sapiens
  misc_feature: n=a,t,g or c
atcagntgttttntatctcttttattctgcttttttcctaatgtcataatccatttgactcctaagcatgtaagtaggtaccacggaatgtaaacaagtaaggaaacagaaataaactgaataatacgtggaaacaaagctgtgactcacacagatgaaatagctgcacaaaagaaataacatgaaaacatttaaaaagagacttaatgtagggaataaggctattttaatcaaggcaaaaacaaatttatatccattatttctaaaaataaaattaggacttttcccaatccttaacatctggcatttaataatatcttctaacccnaaatacaggtggctaaaacggccaggttaccttatatcttggtacnggcctaccggttggt

SEQ ID NO: 478 - DNA, 145 bp, Homo sapiens
  misc_feature: n=a,t,g or c
tttnaagaaaaacnctagcacatttattgggagagtaagcctgggaaagactaagggagtggtggcagggagaaaggctgtggggantcagagcgggtnctcagttgggtcttgaaggagaagaggaggagggtgggaggtgggt

SEQ ID NO: 479 - DNA, 359 bp, Homo sapiens
  misc_feature: n=a,t,g or c
acaacaaccctatgaggtaggtactattattcccattttaaagatgtgaaaattctatacagagaggttaagtaacttgcatcaagtcagagagttaataaatgagggagctgattaaaattcaggcgcctgggtacccaagttcctgttcttaaccactacactctaggcagcctctaagtttaggccctgcaaccagagttcctccaggggaagggaacgcttcagggtcatgggagaagttcaagggggaaaatatccaaatgggctctgtctccaaatggggggagatccctaagggggccagaggaagggtnagggccaaggggggaggccttccacttacagnggaggccagg

SEQ ID NO: 480 - DNA, 252 bp, Homo sapiens
  misc_feature: n=a,t,g or c
cagattcacttcacttttattatgaacaaacacaatctcagattagtacaattagcttcagagttgatattaatagaaattattccaaatttatccttgtcacaagtaactactatatcccacataaaaggggaaaaaagcccacccaatcacagaaatgaggcatccccggtatgtttccggggcaatgcgttgtttatgtattgcccaaatttngtctggctagttatccaccgcttctccaatggattc

SEQ ID NO: 481 - DNA, 299 bp, Homo sapiens
  misc_feature: n=a,t,g or c
tttctgagacactgtcgatttattttagcatttacatttgacattcatttaacagacacacaaggcaagccaacaggtaaacatgcttacacagcctgcagaaatcgccaggttttancttgttttttaggaaaacaaccaaaacacccaaaatttaccatgacccggtacaggaaaaacaggaggactcaagtgattactagagctgcaagtgtttcttagaattgaaccaaaaattgttttttcccaactggttcaaatttcctctaagtgcaggtgagaaaaaaggcaattatatt

SEQ ID NO: 482 - DNA, 349 bp, Homo sapiens; identical to SEQ ID NO: 259
  misc_feature: n=a,t,g or c

SEQ ID NO: 483 - DNA, 338 bp, Homo sapiens; identical to SEQ ID NO: 260
  misc_feature: n=a,t,g or c

SEQ ID NO: 484 - DNA, 460 bp, Homo sapiens
  misc_feature: n=a,t,g or c
tttttgggtggaagggtgagccantgtntttttttaattttaatttttaaaaaatttaaaaaattccctattcaaaggtcaaaaagccacataagttttgatgatgatcattttgaacggaggctcgagatggactgagaggactgagacacagaagtggggggaccatggtttttactggctggaccacagggggaccctntccacccgcctggnttgaggaaggtttctggggtgctcaggtgggtttnttctcagcaatgcaggcatagtcagctcttgggatcctccttgggngcctctcttgtctctgcccctgaggtcaggtccctcactgctgggcactggcagcctctgcagagaatgcaatagtgggagttcctgctctgaggaaccctggggncccagntccttttccagcctctttaaaanattccgcganaaacatttaggnaagggt

SEQ ID NO: 485 - DNA, 302 bp, Homo sapiens; identical to SEQ ID NO: 275

SEQ ID NO: 486 - DNA, 408 bp, Homo sapiens
tttttttttcagatcatattcctttattacatatatgaaatataaaaacaaattaacaaagcaatatatatatatatttgcaagtccacaggcttcagagaaaaaaaggttctgtatgtgaaattattcatatggcactgtgttcatgttttgtatattcaagtacaaaagaaactatgtatagtggttatgcgtgggtacagaagatgaataataatgaaaaactgtgattttttgactatcacatacattgtgttaaaaaacaggtaaatataatgactattactgttaagaaagacaaggaggaaaactgtttcaatgttcaggtttaaatactaagcacaaaaatataacaaattctgtgtctacaataatttttgaagtgtatacagtggcattgccaatgga

SEQ ID NO: 487 - DNA, 532 bp, Homo sapiens
tttttttttttttttgaacagagacccaaaataattttaatgcaaataacaaaatgagttagtctgtctccatcacatagcccctcaatgaaagaattacagtactttataaaaatgtcataaaatgcgcaaactacagttccttcaaatacagttgatgctatctttggtcctaatatgtgcttcttggatgtctactaattttgttgttgttattgttcttgaataactggtaataagcaccaagtgacgggctgattctatctacaggtaagaagcttggatgttttctccctgattttgtcatttctttccaacttcccaaatgcatgtcatacagcagggaagaggcatctctcatgtctcaaaaaagcttaatggcacagatggatgtgggcactgaatgttgtacagtagtgggcaaccagccgggaaaatccataggatcatttcagaccgcattcaacacagatactcatgtagccccgacgtttcttgtgaagggaattgatggaatgcctgagggggtcga

SEQ ID NO: 488 - DNA, 467 bp, Homo sapiens
  misc_feature: n=a,t,g or c
ggtacaaaaggtgtctttattgaggtctgggttaaaattaggcacttggccagagcagcagcttaaatatgaggcaagcagtcaggggttagccatgcctgggnntgggttggggtcatgaggctacaggcacagactgtccccaggtggacagaagttnggagcaggannnnnngnnngnnngggccgcanancagcctgggtcagaggcctggtgggcnagcccagtgggactaggcaggaagctctggtggcaggtccagcagngaggggaccaggatctcttgctccacgtgccccttagacccaggcctgagcctctggnagngggcagccgcacttggcagggcggtcttcccaagcctcacttncttcaccttngcatcgtaggtgccttgcattcttgtaggcgctcacgtagccactgtcgtccaggatgtcctgccgtcccgcaatgcccttgccct

SEQ ID NO: 489 - DNA, 282 bp, Homo sapiens; identical to SEQ ID NO: 284
  misc_feature: n=a,t,g or c

SEQ ID NO: 490 - DNA, 198 bp, Homo sapiens
atattcttaaatctcaaatgagatttatatattttaattaattaacacacttgttttgaatacatactatgtgccaggctctctgctagctactagaaaacaaattacaaaaacaccattcacttttctttaaccgtaacttattgaatgctataattggaagtgagtgtaaaagtgagtgtatatgaaataaaccat

SEQ ID NO: 491 - DNA, 466 bp, Homo sapiens
cccctttttctgggataagtacatttttggaccaccttgcttattcccttggggactgatcatgattcaccacatttgttctttgcagattattgctcccccagagcggaagtactcagtctggatcgggggctctatcctggcctctctctccaccttccagcagatgtggatcagcaagcctgagtatgatgaggcagggccctccattgtccacaggaagtgcttctaaagtcagaacaggttctccaaggatcccctcgagactactctgttaccagtcatgaaacattaaaacctacaagccttacttctctgtgtggggctcttttttcctgggctatgtctcatacacagtgctaaggacttttcacacattacttttaatccatgcaatagtgctctaaggtaggtgctatcattatacccatattacagatgaggaaattgaggctcagagaagtca

SEQ ID NO: 492 - DNA, 1622 bp, Homo sapiens
ggccggcggcagagctgtccggctgcgcggtggcccggggggcccgggcggcagggcaagcagcgcggcctcggcctatgcgaccggtggcgccggcgcggcttctgcctggagaggattcaagatgaccaacgaagaacctcttcccaagaaggttcgattgagtgaaacagacttcaaagttatggcaagagatgagttaattctaagatggaaacaatatgaagcatatgtacaagctttggagggcaagtacacagatcttaactctaatgatgtaactggcctaagagagtctgaagaaaaactaaagcaacaacagcaggagtctgcacgcagggaaaacatccttgtaatgcgactagcaaccaaggaacaagagatgcaagagtgtactactcaaatccagtacctcaagcaagtccagcagccgagcgttgcccaactgagatcaacaatggtagacccagcgatcaacttgtttttcctaaaaatgaaaggtgaactggaacagactaaagacaaactggaacaagcccaaaatgaactgagtgcctggaagtttacgcctgataggtaaacaaatcatactccccagtcaagacttccctgacagtcccactacgagaaagctgtggtgggacagccaagtactcgtttccacaccaagactcagactttttgagccaaaaaaaagccacattcttacactgtccagcttgtaatggttaatgtaaaacttaccagatgaaccttgtgtttcagcttttttcttttccccttccccttgcttcagaggcctgatggcgtcggactattccgaagaagtggccacctccgaaaaattccccttctagaacatgtagacacttgagaaatgtttctgtttgaagaaaatagagggagaaacagaagtcttaagtctgtggcacactgtgtcttcagacagtttgaaggaatgaaaacctagagattttaaatcatgaattgaacatgtaaaattccagtaaaatgtaaaaacggaatatgcatcgctcttaaccttgagcatagtgacttagagacactgtgtatcagttttgccaataagactgtggacttcatgattgttgttgaacttctgggtcaaaactcaaatgaggtgaattttgcctttaaagggtttatttgctgagaaccaactttcaatagtcatgagagaatcaaataatagatgtccgtacaagtagcgcatatatttaaccatttagtttggggctctatattacttgcttgagccttaatcaatgtggttttattcaatggtttgttctttgaatggttgcaaaaactgtagataatcttactgaggactgtacaaacatgaaggtgtggtatcaaacttcaggttgaaactgtttgaagcattataaacattcatttcacaactagattgtataaggatattagctgtgatgagactcactgcattattttttttagtgaattttatgaaatccccgttccattcaacaggcacatgtttaaaagagctttgtcgttggtgttaatgggggaatgtgttccttcattgtatttgggccttttgtattgcactcttgatattaaattaaatgtgcctt

SEQ ID NO: 493 - DNA, 4859 bp, Homo sapiens
cacgttgggtgacataatggggtttttttaattatagattcacactgcatttattcatcacccctgtcctctcatccataactcaaatttactaccagcaacacaaaatacaaagatgtgtccagtttcactacagctcttcgcgtttacaagtgtcgagcgcttgctttcggaacgcccttgtgattggccgagccaatgccagtgacatcaaccaacttacttttgattggaaggctggttgctgggactgtagcgtttgcaggaagtcacttaactgtttgggagctggaaaaccgaagctgaagttctcttttgccataggaacgagcgcaactgactaggaaagatgtgtcccaaagctccgcaagctggaacgtgagccaggaggcccggaccggccacgggaccgcgaggcactccgaaagtgtgcggctgccccttccctgcctcccagctgttacccttttaaatgtcagtgttcgaggctgtaggggtagcacgaggcagcgaaacggaacagtcggattggccgcacgcctcagttctagacgcacctctccaccgaagccgttctgactggcagggggagaaagtaaacagagttgaatcaccctccccactggccaattggagggggtttggtttgtgacgtgatgggattctgcgaaattgttactgagcaagagaatgccggaacgtgcggaccggccggagcaggggttcagaagccgtcagtggactcgggaaaaagtgtctcttagacctggcgctcggcggggccctcgccacccgcgtcggggtgatcgggtgaatgtcctggggctttggctcgacggcgaggcggccgagggcgtgcacctctcttgcagtttcctctcccagcgcctcgggggcgttttcagtcgaataaacttgcgaccgccacgtgtggcatctttccaagggagccggctcagaggggccggcgcgcccgtcgggggatcgcggccggcgcggggcaggggcggcggctagaggcggcggcgcggcggagcccggggccgtggatgctgcgtgcggaggcgctgccggttacgtaaagatgaggggctgaggtcgcctcggcgctcctgcgagtcggaagcgccccgcgcccccgcccccttggccgccgcgccgtgccgggcgggcgggtcgtcgtccgaggccagggagggcgagccgaacctccgcagccaccgccaagtttgtccgcgccgcctgggctgccgtcgcccgcaccatgtccgcggccgcctacatggacttcgtggctgcccagtgtctggtttccatttcgaaccgcgctgcggtgccggagcatggggtcgctccggacgccgagcggctgcgactacctgagcgcgaggtgaccaaggagcacggtgacccgggggacacctggaaggattactgcacactggtcaccatcgccaagagcttgttggacctgaacaagtaccgacccatccagaccccctccgtgtgcagcgacagtctggaaagtccagatgaggatatgggatccgacagcgacgtgaccaccgaatctgggtcgagtccttcccacagcccggaggagagacaggatcctggcagcgcgcccagcccgctctccctcctccatcctggagtggctgcgaaggggaaacacgcctccgaaaagaggcacaagtgcccctacagtggctgtgggaaagtctatggaaaatcctcccatctcaaagcccattacagagtgcatacaggtgaacggcccttcccctgcacgtggccagactgccttaaaaagttctcccgctcagacgagctgacccgccactaccggacccacactggggaaaagcagttccgctgtccgctgtgtgagaagcgcttcatgaggagtgaccacctcacaaagcacgcccggcggcacaccgagttccaccccagcatgatcaagcgatcgaaaaaggcgctggccaacgctttgtgaggtgctgcccgtggaagccagggagggatggaccccgaaaggacaaaagtactcccaggaaacagacgcgtgaaaactgagccccagaagaggcacacttgacggcacaggaagtcactgctctttggtcaatattctgattttcctctccctgcattgtttttaaaaagcacattgtagcctaagatcaaagtcaacaacactcggtccccttgaagaggcaactctctgaacccgtctctgactgttggagggaaggcaaatgcttttgggttttttggtttttgtttttgtttttttttctccttttatttttttgcgggggagggtagggagtgggtgggggggagggggtaaggccaagactgggtagattttaaagattcaacactggtgtacatatgtccgctgggtgagttgacctgtggcctcgcacagtgattctaggccctttatgcttgctgtctctcagaattgttttcttaccttttaatgtaatgacgagtgtgcttcagtttgtttagcaaaaccactctcttgaatcacgttaacttttgagattaaaaaaaaaaacgccatagcacagctgtctttatgcaagcaagagcacatctactccagcatgatctgtcatctaaagacttgaaaacaaaaaacagttacttatagtcaatgggtaagcagagtctgaatttatactaatcaagacaaacctttgaaaggttacactaagtacagaacttttaaaccttgctttgtatgagttgtactttttgaacataagctgcacttttattttctaatgcagaggatgaataagttaaatacatgctttgaggatagaagcagatgttctgtttggcaccacgttataatctgcttattttacaatatacacgtttccctaagaaatcatgcgcagagatgtgagggcagaatatacacaacagatgctgaaggagaaggagggtagtgttttgcaaaagaaaaagaaaagaaccaacagaattttaactctattaacttttccaaattttcctatgcttttagttaacatcattattgtatcctaatgccactaggggagagagcttttgactctgttgggttttatttgaatgtgtgcataacagtaatgagatctggaaacacctattttttggggaaaaaggtttgttggtctccttcctgtgttcctacaaaactcccactctcaggtgcaagagttatgtagaaggaaagggagctgaaataggaacagaaaaatcaacccctataactagtgaacaccaagggaaaataccacaatgatttcagaggagactctgcaaaatcgtcccttgtggagaatgcaggcaacatggaatactacgaatgaaatcacatcactgtatcttttacatcaatagcctcaccactaatatatcttgtatctaggtgtctataatggctgaaaccactacatccatctatgccatttacctgaaaacttaactgtggcctttatgaggccagaaaagtgaactgagttttgtagttaagacctcaaatgaggggagtcagcagtgatcatgggggaaatgtttacattttttttttcttcagaagtaacgctttctgatgattttatctgatatttaaaacagggagctatggtgcactctagtttatacttgcgctctgaaatgtgtaaacatagggtgcctacctatttcacctgacccatactcgtttctgattcagaatcagtgtgggctcctgcagtgggcgcgggtcacggctgactccaacttccaatacaacagccatcactagcacagtgtttttttgtttaaccaacgtagtgttattagtagttctataaagagaactgcttttaacattagggactgggagcagtccatgggataaaaaggaaagtgttttctcacgagaaaacatgtcaggaaaaataaagaacactttctacctctgtttcagatttttgaaacacttattttaaaccaaattttaatttctgtgtccaaaataagttttaaggacatctgttcttccatacgaaataggttaggctgcctatttctcactgagctcatggaatggttctgcttatgatactctgcacgctgccttttagtgagtgaggagtttggggttgcctagcacttgctaacttgtaaaaagtcatctttccctcacagaaagaaacgaaagaaagcaaagcaaagtcagtgaaagacaatctttatagtttcaggagtaaatctaaatgtggcttttgtcaagcacttagatggatataaatgcagcaacttgttttaaaaaaatgcacatttacttcccaaaaaagttgttacttgccttttcaagtgtgacaaactcacatttgatattctcttatatgttatagtaatgtaacgtataaactcaagcctttttattctttgtgattaaatcctgttttaaaatgtcacaaaacaggaaccagcattctaattagatttactatatcaagatatggttcaaataggactactagagttcattgaacactaaaactatgaaacaattactttttatattaaaaagaccatggatttaacttatgaaaatccaaatgcaggatagtaatttttgtttacttttttaaccaaactgaatttttgaaagactattgcaggtgtttaaaaagaaagaaaagttgttttatctaatactgtaagtagttgtcatattctggaaaatttaatagttttagagttaagatatctcctctctttggttagggaagaagaaagcccttcaccattgtggaatgatgccctggctttaaggtttagctccacatcatgcttctctt

SEQ ID NO: 494 - DNA, 419 bp, Homo sapiens; identical to SEQ ID NO: 185

SEQ ID NO: 495 - DNA, 5047 bp, Homo sapiens
ccgttgctgtcgccgttgctgtcgggggcgctgtgcgctgaggaaggcgcgggcgagccggagcagaagaaggagggagggagccagccgctgcagccaccaccgccaccatgtcctaccaaggcaagaagaacatcccgcggatcacgagtgaccgtctccttatcaagggaggcagaatcgtcaatgatgatcagtccttttatgctgatatttacatggaagatggcttaataaaacaaattggagacaatctgattgttcctggaggagtgaagaccattgaagccaatgggaagatggtgatccctggaggcatcgatgtccatactcacttccagatgccatataagggaatgaccacagtagatgacttcttccaagggacaaaggcggccttagcaggtggcaccaccatgatcattgaccatgtggtgcctgagcctgagtccagcctgactgaggcctatgagaaatggagagagtgggctgatgggaagagttgctgtgactatgccctgcatgtggacatcacccactggaatgacagcgtcaagcaggaagtgcagaacctcatcaaggacaaaggggttaactccttcatggtttatatggcttataaggatttgtatcaagtatctaacacagagctctatgagatcttcacctgcctgggagagctgggggccattgctcaagttcatgctgagaatggggatatcattgcccaggagcaaacccgcatgttggaaatggggataactggcccagaaggccatgtactgagcaggccagaagagctggaagctgaggctgtgttccgtgccatcaccattgccagccaaaccaattgccctctctacgtcacaaaggtcatgagcaagagtgcagctgacctcatctcacaagccaggaaaaaaggaaatgtagtctttggtgagcccatcactgccagcctcggcatagatggaacccattattggagcaagaactgggccaaggcggctgcatttgtgacatccccacccctgagccctgacccaactactccggactacatcaactccttgctggccagcggggatctgcagctatctgggagtgcccactgcaccttcagcactgcccagaaagcaattgggaaggacaacttcacagccattcctgagggcaccaatggtgtggaggagcggatgtctgtcatctgggacaaggctgtggccacagggaaaatggacgaaaaccagttcgtggctgtgacaagcacaaacgctgccaagatcttcaacctgtatccccgcaagggaagaatatctgtgggttctgacagcgacctcgtcatctgggatccagatgctgtgaagatcgtctctgccaagaaccaccagtctgcggcagagtacaacatctttgaagggatggagctgcgcggggctcctctggttgtcatctgccagggcaagatcatgctggaagatggcaacctgcacgtgacccagggggctggccgcttcataccctgcagcccgttctccgactatgtctacaagcgcattaaagcacggaggaagatggcagacctgcatgccgtcccaaggggcatgtacgatgggcctgtgtttgacctgaccaccacccccaaaggtggcacccccgcaggctctgctcggggctctcctactcggccgaacccacctgtgaggaatcttcatcagtcgggatttagcctgtcaggcacccaagtggatgagggggttcgctcagccagcaagcgcatcgtggcccccccaggcggccgttctaatatcacatctctgagttaagcaagccttcctcaaagagaggggcagaagcaagaagagattgttttgaagccaaaatggtacaccgatatttaagaaggaaagcgaatccaaacggttgtgatctaaagaatcaataagcctcaagccttatgtttctccaatgttacgctcgcttgcctagctttacgaatattgctttgttttctgtttatgcatagccttgatttgtttgactcccctccccccatttacatgcatgcaatcagacaggccactaaggtaaaagagtctgctctatcatagtgttgagagcgtgtgtagtgctgcatcttatgacaaggggacagacaagctgggacgtcagggaaatgaacaaaagggacgcaggttatttggggtgagtgggtggtgggagcctggagcaaggtggagggtgcagaggggctggggtagggcatgtaggagggaggtgggtgggtcaggtgagtggaaggggtgttgtatattgtgttgatgacgtacgttatttccatggaagatagccgctgtggcagctgtcacatcaccacagctccctagggtctgccgagaaggcaggcagtctttgggttctgttctttgtcacgtcccctacaagtaaattttgtttctttgaacgtttattaaaatgccaagacccaaccatttcttccacctgcttgattgtgccagtgtttgctcaggcctctttcttagtgttgctttcaaatccttctctttcctgggttgggaaggccaggcagggacagagcaaatgacacttctcttcctcttgccctccctgcctctttggtgctcttaaaagccagcagctgagaacatagcacaggcccacgtggtgagggcacccacagcttaaagacgcttccttctaaacacggcgaggtcacctctcactcttctgtctttgcaaaccgagaagagtggcatgcttctggcatcccaagtcaggattttagctcagatgaggcagaatgaagggcctctcttacaggcagtttgtgtttgattctctcgatcctggcacatccatgataaataggagtttttgaaagttggttttattaggtgttccctaatttttaccgtaataggtcatctcagcttatatgaaagtcaagtggggaactgggaaagccaaagtcagtcttgagcagagggagcacattttgtggacctggttccacctttccattccaaaccacctgtttccccttccattagcagaaactctgggggaactttgtgtctcagtcctagaatctccccaagtgagtggaagtgacatgatgcagtcttcctcatggggcacctgaaagaaattagtgtgggtgcttcgatctaccttgtctgtcagagttgaatatctctttccctatcatgctgcttctgaaaattcagttttggagcaagtcctgtgagcaagataagaatctatagaaccaagatgctcattttcagaagaaatatgttcaacctgggatcagacttccatgctctggggaatccaagtggtagcacctgtaaccctgtgtactaagtgctttgaagagaagagcaggcctcagacaccttttaattgcttaggagaaaccattgtctctgactgcaggtttgaataagttgaagaccagagaaaagtacacactgggctacaaaggaatttggagatagccaaggaacaggatttcccctagcaagctaccttctgttcaaatcatgaaaaaagactatttccccttagaatagggaagcttgctattttaaagctcttgtagtgcttttcttttaagggagatgtagtaaaagggaaaatgtagctcttagtttacacttcaaagatgtgggggtctttcagagaactaagaataacagttttatgtgcagagagagtttgccagatctgaagcatatacctcattgactaggctgttactttgggataggttgcagtaccagccacagccagcagatagaggaaaagacacacataaactcgcttctgagcgtccacttctgcactctctgctctgctgttactcagcccctgagtctgactcatctctgcacaacctctctgtgccatgaagataagtcttccatggccaaatcggtcatccgcactgcccttgggacttccgaagtgaaccattccaccagaacctttgattctgcacaagatttccttgctctgggaacaacccccaaatgcccttgggaggaacaacatgagctcaggaagcctctctttcttcacttaccattactaactctccaagcatagaaatccctgggaattgcgagaataactcccactattttaaaatttatattcagatttgtttcgtttcataagacacatcaaacaggcctatacaaaaggtttaggaaaagaaaacaatggtgagtcccggccctcttcgaattcactggcacctcatgcaagtgtaggaaggcacgctggatcgtctatctgattccaaagctgtcctttgccatctcatcccttggcctgccccccaaccctgaggatgcccctgccatccccccaacctcctcatattgcctctgaacccagatggcaatccatcccggttctctctgagggccacgggcttgggtagtggaaagggtgtttgggaaattgttaaatcagttacccgtagtagagctatttcttgtacttctaagttttctagaagtggaaggattgtagtcatcctgaaaatgggtttacttcaaaatccctcagccttgttcttcacgactgtctatactgagagtgtcatgtttccacaaagggctgacacctgagcctggattttcactcatccctgagaagccctttccagtagggtgggcaattcccaacttccttgccacaagcttcccaggctttctcccctggaaaactccagcttgagtcccagatacactcatgggctgccctgggcagccagcattcattgtaagttccctctttgaaaactggtgtgtgggtgttcagttctgtgtctggtgggtatggacagacagtaatctcctgtgatctgtgctagctgtgaggcagctctggaacgtgaagagctgtttggtttgaaccgtgaacaaaactgtgttttgagtttagctgacattaaagaaaaaagttcatcacgtgactgttaatgtaaacctggttattaaaataactatgaaattac

SEQ ID NO: 496 - DNA, 5426 bp, Homo sapiens
ggggaggaagaaaggcgaaggcaaggcgaaggggtggagagtgatatgaagagcgagagaaaagagaggacagcggacgagcagatccggtatctggaatcccggcgcctagaacgtgtttttcgggagagcaaaggctgtgtctacggcaggctggggatatagcctctccttccgatgaaaagagaaaggaagaatggactacagccaccaaacgtccctagtcccatgtggacaagataaatacatttccaaaaatgaacttctcttgcatctgaagacctacaacttgtactatgaaggccagaatttacagctccggcaccgggaggaagaagacgagttcattgtggaggggctcctgaacatctcctggggcctgcgccggcccattcgcctgcagatgcaggatgacaacgaacgcattcgaccccctccatcctcctcctcctggcactctggctgtaacctgggggctcagggaaccactctgaagcccctgactgtgcccaaagttcagatctcagaggtggatgccccgccggagggtgaccagatgccaagctccacagactccaggggcctgaagcccctgcaggaggacaccccacagctgatgcgcacacgcagtgatgttggggtgcgtcgccgtggcaatgtgaggacgcctagtgaccagcggcgaatcagacgccaccgcttctccatcaacggccatttctacaaccataagacatccgtgttcacaccagcctatggctctgtcaccaacgtccgcatcaacagcaccatgaccaccccacaggtcctgaagctgctgctcaacaaatttaagattgagaattcagcagaggagtttgccttgtacgtggtccatacgagtggtgagaaacagaagctgaaggccaccgattacccgctgattgcccgaatcctccagggcccatgtgagcagatctccaaagtgttcctaatggagaaggaccaggtggaggaagtcacctacgacgtggcccagtatataaagttcgagatgccggtacttaaaagcttcattcagaagctccaggaggaagaagatcgggaagtaaagaagctgatgcgcaagtacaccgtgctccggctaatgattcgacagaggctggaggagatagccgagaccccagcaacaatctgagccatgagaacgaggggatctgggcaccccaggaaccgccattgcccataagacccccaggaagctaggcactttctttccatggaaacatttagacacaaacctccccagctccggccaagccatcatttgctacctggagctggatgtagaagtcagcagacagctccctatccctggacccctgccctccttttttctgctcacaaggacttttgattttagttataaggaggacccaaaatgtgtgtgtgtacatgtgtgtgcacacatggtacgtgtccatgtgcctacctgatactttcacatgtaattaaattccaggcaaccagcacaagagccgtgagcttggcacatgtgctgctcgtgagcaggaaaatcagaggagccactgatctgagtggtatttaggttgaaggaaagatttctcctctcaagtgccagggagcagccacacgtctgtctgtgtttagagagggaagagggttctccaggttcaccatttgggttgtttatatgttggtagaaattctccctgtatgcctagaaggatcagtgaatgtaagagccttggaaattaacaaaataacagccacataaccttgcggcaagtctgatggaaagaaaaagataaaccatccgtggggtagatgcaataagcccacgtatttttacactggaaacgttgattgttttaaatgacaaagacatatgtgatgttctatgtggaaacctgtgaagagtggattctgcctccatctctgcctccatggctacctttaggagacagagaagatcctgtgtgtttctctgtacccagctgacagcctgtctctatggcgcttccttgagtggaaggaaatgtctcaagaaacaaagatctcgctggtgcgtacacagtgctgaccagctagtgtggccagggcctggtggcctggtggccaggaagtttcaggttgaagggaaatgtcgaggctacctgcagatatgacaggtgccttgaacgcagcccatcttcatgtcatcaaaggtcttcctgcacttgaagctggggcgatgtttgcagtcaagaccattctttccaacctctgggttcttgcaagttgccctcaccttgtgtgtggagatgcattccaagaatgaagcctcatcttgctactgagtgtggggttcagggaagctctttaggccacctggtgaaggtgcatggggaggatggagcttctcctcagctcctctgagcagccacctatgtgatctttaaatccaaccccaatgggagaaaagggcaagaacagtctgtgccctgggactcctatcaggaagcttgacaggcagctgggcatcagtgcagctgatatcgtttgaggagggagacagatgcttggacctgggtgcctggctatggagattgaccaagcaagatcaggagctcctgatagcaggcgtctttgagcctagctggggtagaggcactgcccatctcttctccaccttctctccacagaatgtttgcagagctgggcagttgaggaaaggacagcccctggttggtgcctccaaaggaaggtggacttttttggtggagacgtttctgccctgggcaccctcctgcccccgattcatacctatggcttcttgagaaggctcacagctgtggtcttaacgtagactgcagaaagatggcatgcggcccctggcatttcgccaagggttttatagcaagtctccttcctccatagggacagcagcaccagccctgtggggcatggagtggaagcccagaagggcttctgcaagctgcacagaactggggtaagaagacaaagagtagccaccgggagaggcttcctttgttacagctgggaaagaacagttctgtgaatgcaaacacctcctgagttttgcaattgagaaaatgatttggagaacttctcttctggtaatttttattttgaatgttcagggccttagttggccccagtaattctccttggaggacttgggagaagaatttccacaaagcaaactactaaccactagctcttactggacagcgatttctggcttataagagttctctttgatttgcactagcactacgatagtgttagatggggaaatactgcaacatgtccagttggccagatcactttccaagggagcgatactaaggcagactcagctttttaaagatgggaggtcaggaggtggaagtgagaggagatcccatctcacacaacacacttccacgtaatgcagaccacacttttccattttgtcctgccctcttgagaggtcatttctcacgtcctaagaacctgatcagaaattttggaagggttctttgaaatagcagcagttgaaacagagacactttgccacagtgtggagcagattttctcactggtatcacatggtcttgcagttttgaactcttcgaccgatttgtgggagtttatgtaattgcgtgcaatgaacctgaaattgtgtaaaggacaaaagaccagtttatagggttgggttttttttccaacttgtgaaaagcagtttagctgcatctgtctccccaccacccccaccccgggaggggcttatgttacaaggtgatcaagtgaaggaaaaacctgagcctatctggctgggatggtggaattaagcacaaggtcacattctctgtgatcacatgagagggaaggtgatgacttaaatggcagggggtggggattatcttggggagaggctgaaaagcacaaaagatagtcttccctgtacgtattggtgaagaacgtgcacaaggctggatggacttcaacttggagttgagttgaggcaagaggatttctggatattagtcacccatctgcaagaaaaatgctgaggcctcgggtcaagattttgatctgagacatgctgatgcttcaaggagaaatattttcacaatcctctcttccctcaccagaagagaacagtactctctcctagaaacctctaggtaaacacattttatcctaatatcggtagcatataatgccccccccaaaatatctgttttccatgcaaaaaagtctcaacaagaagtctgtggagttgagtggttacttcaaagtgtcaggagagtgaagaaattggccacagaagagcaagaagctctcttaagaaaagggaattctctttaaagaaaccaccaccaacaacaaaacaaccaaaaaccatgttttatgtcaaagctctgtagcacagagaatgtggtgtcacagatacatcgccgagagaggtttctttctttcttttttttttttttgagacagagtctggttctgtttcccaggctggagtgcagtggtgggatctcagctcactgcaacatccgcctctggggttcaagtgattctcctgtctcagcctcccaagtagctggaattacagggacccgccaccacgcccggctaatttttttgtgtggttttagtagaggtggggtttcaccatcttggccaggctggtcttgaactcctgacctcgtgatccacccgcctaggcctcccaaagtgttgggattacaggcgtgagccactgtgcccagccaaaagagaaatttctacatgaacaaggcaatttcagtgtcttacagcggccaaaccatgacgtgaagaatgagataggagacaggagatcaccataagcgtccctgatatagcagcacacattttcacgtttccacttaaatcgttttgcacaaagtcttgcttcgctcagatgagatgagatatgatttcctagagatgtaaaaataagaatgaatgtggcgcccccttcttccagatgtaatagaaagctctgccctatcacaaggggggtgttgaagcgccccttgtgttttaactgtatttaactgagcacaagatgcacaagctgtggtgggaaaccctcagtttacctttggagtcttccctgcagatcgcagacctgtttccaggctgatgtttctggtgtgtaattgctagcgtttctgaagggttttcccaattgttttagccttgtgaagtattcttaattataacttgcctttcagcgatggtacatgacttgattcaacgtttggttctgaacttacacactgatgcgtttactcatctaacataatctgacagggcctcagcaagggagccatacatttttgtaacattttgatatgttttaatgcatctgacttagatcttactgaaataaagcacttttcaaagag

SEQ ID NO: 497 - DNA, 3184 bp, Homo sapiens
ctctgctgtgctgcctcaaacgcggagggctgcgtgcagtgggagcgggctccaggagcccgagcctccagccgtcctcagagcaaggcagcaccgaggcctggccacagcaatatccatctggaagctcttcccttcactcccaactctgaggttgcctaactctttattaaaaattcagaagggggaatgccagcccctagcatggactgtgatgtttccactctggttgcctgtgtggtggatgtcgaggtctttaccaatcaggaggttaaggaaaaatttgggggactgtttcggacttatgatgactgtgtgacgttccagctatttaagagtttcagacgtgtccgtataaacttcagcaatcctaaatctgcagcccgagctaggatagagcttcatgaaacccaattcagagggaaaaaattaaagctctactttgcacaggttcagactccagagacagatggagacaaactgcacttggctccaccccagcctgccaaacagtttctcatctcgcccccttcctccccacctgttagctggcagcccatcaacgatgccacgccagtcctcaactatgacctcctctatgctgtggccaaactaggaccaggagagaagtatgagctccatgcagggactgagtccaccccaagtgtcgtcgtgcacgtgtgcgacagtgacatagaggaagaagaggacccaaagacttccccaaagccaaaaatcatccaaactcggcgtcctggcctgccaccctccgtgtccaactgagctgcctgctccttctcgataatagccgtctcctctttatcatgctttttccccctgttgtttgtcaaaaaaaattgcctttaaattcctgggtgtttggttgtttgagattccttccttgttatcaagcctctcggacaaaagggctaggaaaaggtgatatgtctcctgatcatatcatacccattaagtataacccattatttagaaggttctagggaaaaaagtagtattttcttattaaacaatcagcacagcctatatctttgttctctcatgttgatccaagccagagacatcggtaacaaatagcacctgtgttgtttgtgaggtgtttcagtcccagtcctgatgtgtgtgcgttgttctctcctggccacttaaataggaccatatgtaaacttgactttgactgcatgagatatccctatctggtctcactcagtcctctgcatcccaacattcccaggacatgcatgatcaccagcatttattttcattatttgaggatatcttataactcacagattgtcagcatccagccatgtcctatctagattaggaaaatgatcagaatattccagctcaacaagtctgggtatactcactattgtgagtcaatacaccatagctctgttgaaattcctggaggcaaaattgaccttggccccaaagatattcctcaatagatttcaaacaccactcccctgtagaactctcccagcctcgttggggaggcttgtccagggtgatagagactgatttcagacaaacctatttattacaaaagtttcatggtgtctgaatgattgttttctctctttgtatatttgtacaaatgtttcagctgtgcttttaaaaaatctggatgttttttatttagtgattgttcgacaattagctgcttcaaaacataatgtgcattgcttatgaatgccttcatatactaatacagatactctgataatattacactctaataaggataatgctgaattttgaaaggacacaaaacatctaatgccaatatatacatggttagccaacatctttgctatcaagaccacttgttttaaataaagatgcaagtgtcagttgtagattattgggatgaagctaaatccccagaatgcagcagcagctgagcatgttaaaatggggaaggatgatagctacatgtatgccggtcctactcacgcgacacccgtgtgctcaaaaaagttacttgtttttgttacgtgtgattttcctatttctctagcccaaagtgcattacagaagatacacctatagaaccattaccttctgctatgtgtgccagggctcatctactcctgtacattaatggattactttagatgcaaatgcagattacaatggagtggggaagtactttcattacccaagcctcagaaaaacacacaagaacaataacacagcaaacagattgagggattgttgtggtttttgactaaggtgtatgttagtttcatcagaaacttaaaacatagactgatcactcagaaattaaagtccgttttactgtgaatatagcaatatagtactggacacagtactggtgaaactgaggagagcattgcttgtaaaatcctgagtttccataaggaaaatgaaaactccttttaaaaataaaatctgaggagtgtacaataagcatatgctttgactttcctttgctgtggaggtttttggtttttcattgatgataaacgactacagacttagtagtggagaaatggtgtcctctagtggaagaaatagtagctccgctattcagatgcagagcactgcagcatccagcctttcaaagctgactcttctcaatcatctgtgggtcatttgacttgattttttaagctaccctgaatttccagaatgcaggttctaaagaaatctagatgagagaaagtatttgaaaatgatttttaaatgttttttaaaagacacatctgacatttttaacaacttagtaaaagttgaaatgaccattctgtgtagtcataaaagaaacacaatgaagtgtatggcctctggagttagtcttagtaaaacttattgctctgtgtcaatgttaacctgtctcagatcaagtaattccttcactaggttgggtttggggaggggggaaaagaggggcttttcctaggagaacgataagaaatggaaagactccttgaagtgttgcaagggaacctcctagcactgtgaaagtcagaatcgcctcagcatttccatgacgcacattatgcaaatctctttagcactattttaaggttgaaaactttaacaatgaaggggaaggggaagatttccaccaactgaatcatttgtgcacgtgtatagctcaaagagcttagacttcaaatatatctggtgaatg

SEQ ID NO: 498 - DNA, 6047 bp, Homo sapiens
cccggagcccaccggccgcaggtgcctcctccggccccagggggccccgggagccctgaagggcgaagcggcagggacgcctctcttgggcgaagaggcggcctcaccgccccggatgcggccggagggcgcgggaatggagctcggaggcggcgaggagcgcctgcctgaggagagcaggagggagcactggcagttgctgggtaatttgaagacgacggtggagggtttggtatcaaccaacagccccaacgtctggtctaagtatggtggcttggagcggctttgcagggacatgcagagcatcctctatcacgggcttatccgtgaccaggcgtgccgccgccagacggattactggcagttcgtgaaagacatccggtggctcagtccccactcagcccttcacgtggagaagttcatcagcgtgcacgagaacgaccagagcagtgctgatggtgccagtgaacgtgctgttgccgagctgtggctgcagcacagcctgcagtaccactgcctctcagcccagctccggcccctgctcggggatagacagtatatcagaaaattctacacagatgctgccttcctgctaagtgacgctcatgtcacggccatgctgcagtgcctggaagcagtggaacagaacaacccccgcctcctggctcagatcgatgcgtccatgtttgccagaaagcacgagagcccgctcctggtgacaaagagccagagcctgacagccctgcccagttccacatacacccctccaaacagctatgctcagcattcctactttgggtccttctctagcctccaccaatccgtgcccaacaatggctcagagagaagatctacttcctttccactctctggccctccccggaaacctcaagaaagcagagggcacgtctcaccagcagaggatcaaaccatccaagcccccccagtttcagtctctgcactagccagggattcccctttgaccccaaatgaaatgagctccagtactctgaccagccccatagaggcatcctgggtcagcagccagaatgattccccaggtgatgccagtgaggggcctgagtacctggccattggcaacttggacccccgaggccggactgccagctgtcagagtcacagcagcaatgccgagagcagcagttccaatttgttctcctccagcagctcccagaagccagattctgctgcctcttccttaggggaccaggaaggaggtggggagagccagctgtccagtgtcctccgcaggtccagcttctcagaggggcagacactcactgtcaccagtggggcaaagaaaagccacattcgctcccattcggataccagcattgcctccaggggagctccagaatcctgcaatgataaggcgaagttgagaggccctttgccctactctggtcaaagcagtgaagtcagcacacccagctctctgtacatggaatatgaaggtggtcggtacctgtgctcaggggaaggcatgttccgaagaccatcagaaggacagtccctcatcagctacctctctgagcaagacttcggcagctgtgccgacctggaaaaggagaatgcccacttcagcatctcagagtccttaattgctgccatcgagctaatgaagtgcaacatgatgagccagtgcctagaggaggaggaagtggaagaggaagacagtgatagagagatccaggagctgaagcagaagatccgccttcggcgccagcaaatccgcaccaagaacctgctccccatgtaccaggaggctgagcacggaagctttcgggtcacctccagcagctcccagttcagctcacgtgattcggcacagctctctgactctggctctgctgatgaggttgatgaatttgaaatccaagatgctgacatcagaaggaacacagcctcaagcagcaaatccttcgtttcctcccagtccttctcccactgcttcctgcactccacgtctgctgaggcggtggccatggggctcctgaagcagtttgaggggatgcagcttccagccgcctcggagctggagtggcttgtcccggagcatgatgcccctcagaagctcctgcccattcctgactcactgcccatctcaccggatgacgggcagcacgctgacatctacaagctgcggattcgtgttcgtggcaacttggagtgggccccgccccggcctcagataatttttaatgttcatccagccccaacgaggaaaattgccgtggccaagcagaattaccgctgtgcaggatgtggcatccggactgaccctgattacatcaagcgactgcggtactgtgagtacctgggcaagtacttctgccagtgctgccacgagaatgcccagatggccatccccagccgggttctgcgcaagtgggacttcagcaagtactacgtcagcaacttctccaaggacctgctcattaagatctggaatgatcctctcttcaacgtgcaggacataaacagtgccctctataggaaggtcaagctgctcaatcaagtccggctgctgcgggtccagctgtgtcacatgaagaacatgttcaagacttgccgactggccaaggagcttctggattcctttgacacagtcccaggccacctgacagaggacctccacctgtactcactgaatgacctgactgcgaccaggaagggggagctggggccccggcttgctgagctcaccagggcaggggctacccatgtggagagatgcatgctctgccaagccaaaggcttcatctgtgagttctgtcagaatgaggatgacatcatctttccctttgagctccataagtgccggacctgtgaagagtgtaaagcgtgttaccataaagcctgcttcaagtctggaagctgtccgcgctgcgagcggctgcaggcccggcgggaggcactggccaggcagagcctggagtcttacctgtcagactacgaggaggagcccgcggaagcgctggccctggaagccgccgtcctggaggccacctgaagaaagcacgtgcagccctccctccgggccgggtcacacctgttgcagaactgagccactctttgaaggactcgccccacctggggcttcttttttttttttttttttaattatcatcatcttttttttttttttactgacttgtctgacgtctgtgtgcagtcagccgtcggcaggttgatgggtccagagtctgtggtgacagataatttgtaaacaccaggtgtttccatcagaactgacatgcgggtccttcagtgaagcttctagtgcctctgtcagtggaagagacagcaagaccaagttcttccagcgtctgtggccttctcctctaggtttcacctgcatgtcaggtatcatttccaattttcctttgtttcagttctggagcttctgagccaggcctttctcaaccacctctcctgctgctgaaacggggatggcgttttccctctccctgtcctggactggggtcagactgtgccccgaggagaagcagcagagaataggactacgtcatgggcatttcgtccacttatttgggtattttgggggccacagaacaatcctgactatcctagactcctcagagacctcagaggcagctgtgaatgtccctatgttgccgggagttcctgtttgaaatatttgaagcatagaggatgccacaagctgactttcttcatctaccttggtgatcttgaagcaaagaacagaactgatgctcaggccaggctcacctgtagccttacgccgcaagcatacgtgaggcgccagctctgtcgctgaaggagcgcttactcagaggagcggtcggccccctcttggtgttaaggtctcttagttaacctggctttttggtgcaggtgtgatctttgaagctcaggcaggtccctgatgccatcctaaggtgaggacaggaacctcacccaccatcttcttagcgtgtccctgatgactctgtcctctgttagatggtcgttgtgcttctgagtaaaagtacaacccgactccgttctctccccttcctgcagcagagctgggtccttccctggtggccgagtctctcttgccttagcttctttggtcaaagttggagaaaagcttcctgctattagtgctgttacagaacttgacggtttgtggatgtgagtgtgaatgtccctgtgttcttgggataacaagagcctttatgccaattatgcacttaactctgtgtagcctggtaatgtttatctgttcatttgataatgctgattttagtgtgctgcccccctccccccgttaatgtgtgttgatggtgaagtccttttgataatgctgattttggtgtgctgcctcccccttcccccccgttaatgtgtgtgttgacagtgaagtccttgggtggggccatgtgtgtgtttgtgatgttccttaagttgatgcagcttctaacctctgtgaaaacactggtcagagtggcttctccaagagctggcagctctgtgaactaaagcctgcatcatttttgttctgggattgaattctgcccatgggcatgtcttctcatagttgcttgctggtaggaaagaaatgggcgtgggtgctgccctggaagctgagcggaaagttgcctgtggttggtggaagctgatgagagcttgagctggcggtaagaaggagtctcccagggaagtgggagaggcattaaggtgatggccagggctgaggctccaccagcgtgagagggaacatgtgggaactggcccctgcccttgattcctctgcctcaaagttgggatctgaaagccatgtagggctagaagaccctgaggctgttctcccttctgttcatagtgagactcaaaaagccaagtcccagaagttctgaagggctgtgactagaagtgcccaggtccttcagggagctttaagaatgaccccacagaactcaagtttaactaggggttaggtcccagattcagacccaggagtttataaaaatgagctctacttccagttttggtttaaattacacatccaggccaggcacagtggctcacacctgtaatcccagcactttgggaggccagtgcgggcggatcatgaggtcaggagtttgagaccagcctggccaatgtggtgaaaccctgtctcttccaaaaatacaaaaattagctgggcgtggtggcacacgcctgtaatcccagctacttgggaggctgaggcaggagaatcgcttgaacctgggaggcagaggttgcagtgagccgagattgcgccaccgcactccagcctgggtgacagagtgagactccgtctcaaaaaacaaaaaggtgacacatccagctctttctccaggtcactgcgctggaggacagatgtgccgtcttgtcctgcctgtttcacatcagcataggatcaaaggatgacaatgctgacagcttctgaagccgaactcaacagtctcataggctcctcacttgtcacttatttttccctagctccctcaaccgcaccccatccctttagatcgtgcgtctgttttagtgactctgacacgatgccgtcctcaccttccaaatacccagttatttattcaagaggggggaagtgggtagaggatgggatgttttggaagcactttgcaagttaccactatctgaaaatcccctgctgttgcggggagaagctttgaatgcactgaagagaattccttctaaatgaaggcaggtgatagtgttctttctgtaagtaaagggaaagaaaaaaaacatagtttgcttaccaggtggagacaagattcaagacatagcagaagagtggaagacaaatattttccacttaaatgaggctgtttttgacgttctctgccaaggatttagagctttcgttgaactaacataaaaggagtgcgagtcttagtagagatgttccgtgtgtgccgcccgtgctctgaactgcgtttccacctgctgtggtgcttgtgcagcctggcagttcattgtcatctttaataaactaaggaaat

SEQ ID NO: 499 - DNA, 2665 bp, Homo sapiens
ggctctgggcatcaccagcggccccagggaaaaagaaagaaatgggaaacagcatgaaatccacccctgcgcctgccgagaggcccctgcccaacccggagggactggatagcgacttccttgccgtgctaagtgactacccgtctcctgacatcagccccccgatattccgccgaggggagaaactgcgtgtgatttctgatgaagggggctggtggaaagctatttctcttagcactggtcgagagagttacatccctggaatatgtgtggccagagtttaccatggctggctgtttgagggcctgggcagagacaaggccgaggagctgctgcagctgccagacacaaaggtcggctccttcatgatcagagagagtgagaccaagaaagggttttactcactgtcggtgagacacaggcaggtaaagcattaccgcattttccgtctgccgaacaactggtactacatttccccgaggctcaccttccagtgcctggaggacctggtgaaccactattctgaggtggctgatggcctgtgctgtgtgctcaccacgccctgcctgacacaaagcacggctgccccagcagtgagggcctccagctcacctgtcaccttgcgtcagaagactgtggactggaggagagtgtccagactgcaggaggaccccgagggaacagagaacccgcttggggtagacgagtcccttttcagctatggccttcgagagagcattgcctcttacctgtccctgaccagtgaggacaacacctcctttgatcgaaagaagaaaagcatctccctgatgtatggtggcagcaagagaaagagctcattcttctcatcaccaccttactttgaggactagccaagaacagacacaatggttcatgcccaaaaggaacagaagttccaactattgcctgggatcttgcgaaaagcgaggttccctgatccctgggagcctcacgtattttagaagccaagagaagccacatggagactcaaattcgcatcttctctatccacatcatgaccaaaggaacccctccctggtgtctgatcagggctgtggcatcacaaaacattggatcatgacatgtcgggcgatgcttggaaaagcccagcatgtatgtatgcacacattgtgtgtgtgggaaggacaaagccactctcacaagaaagggcaccaggactgctctccaaggaactggacctgtccagacagttacactccaaggtcattggagagaacttctgtatgggcaagcctgagagggagaggaaacaaaagctgtgtcctggcagaaggtctgggtttgcagatgggtgccctgaatggaactactttaactaatccatagggacttctggtatgctttcctctctttttaaaggaacttcgtgacactaaacattagcccaaaggacttcttagccttcaattgggagatacctttggtctgctcctgcaccaaagccatatgggtggaagtcagttggcctccctggttctgcagagggccagaagaatgagagagaggaagactgctggcagggaaatcgaggaggcgagactagaactgcaccagcttccctgatgtctgcagccatggctttgcagcgcaaacagaacttctctgggatgctgggattcttgcctgtatgaatgcatcaagtattcatttattgcccgaataggcattgcattaagtcctctgttaggtgtcaggcaagccaaaaaaaaaaaaaagatgctaagtcctaacccccaacagaagtgttcacagtgtagacgggaaaaaatgtataaacaaatgtgtaaaaagagaaatcagctcatggcttaggatggaattagagacaggtgagggacactcaggagctcattttccagctgctcttcagagtggaagggctggctggatcgggtaggtaagaatagctggattttttagaaaagaaatggatacagtctaaagaattaactcacccggtactttattctaagaagggtctggcatccatatgaggaaaaatgctcagctccaggaaagatggggagtccaagtggattaatgatgtcatgcataattttaagagacaagggagaaaacacaatgtatagccagagaaggagaagctcccatccaaatcctactaggaagagagtgggctgcagatgaatctgtgactcatgtttccctgtttcaaagggatcctggggaaggaggggaacatgcttgcagtatctctccctgtctgtctgctcacataagcattccgtccatctaagctcatcgtgctactggtatgtgtatgtgcagttacacagtttcctgtatcataaatcctagtgtgtttatacaaggagacatctgtggtttccccaaccgttccaaaaggctatttcaaaggaaccagcccacgtatgagaaatgaatgtaacactgtggacattgacttcccgcataaggcagggtgaccccctgaactccagatgtttgcacagtatcttatgtgttgttttccgttgtgacgaatgtgattggaacatttggggagcacccagagggatttttcagtgggaagcattacactttgctaaatcatgtatttattcctgattaaaacaaacctaataaatatttaacccttggc

SEQ ID NO: 500 - DNA, 634 bp, Homo sapiens
ggaattccaggagggtgcagcttccttctcaccttgaagaataatcctagaaaactcacaaaatgtgtgatgcttttgtaggtacctggaaacttgtctccagtgaaaactttgatgattatatgaaagaagtaggagtgggctttgccaccaggaaagtggctggcatggccaaacctaacatgatcatcagtgtgaatggggatgtgatcaccattaaatctgaaagtacctttaaaaatactgagatttccttcatactgggccaggaatttgacgaagtcactgcagatgacaggaaagtcaagagcaccataaccttagatgggggtgtcctggtacatgtgcagaaatgggatggaaaatcaaccaccataaagagaaaacgagaggatgataaactggtggtggaatgcgtcatgaaaggcgtcacttccacgagagtttatgagagagcataagccaagggacgttgacctggactgaagttcgcattgaactctacaacattctgtgggatatattgttcaaaaagatattgttgttttccctgatttagcaagcaagtaattttctcccaagctgattttattcaatatggttacgttggttaaataactttttttagatttag

SEQ ID NO: 501 - DNA, 3409 bp, Homo sapiens
ggtaccagatatgtgggaggaggcaaggtaagggaaagagtacttgaagttggaactggtccttgcagggaaatgcacatttatgaaaccccgaaaactgatgtcaaagcacctcctgccttgggcagtcctctcagagtctacaggtgctgcctccagaaccctcttcctggagcgcatccctatgtatctagaaattctgctgggaaatatgatggtcagacccttggccacctgaaagttcagggtggtagaagaaaaaggaaagccacagggcagcaggggcaggtgcagcaaggaaggcaggcacgccaggaagacacccatgggtagaagtgcagatggcccgagggcacagtttgctcaactcacccaggtttgctcttgctggggccaagaggactcatgtgccagggccaagggctctgggggctctcacagggggcttatctgggcttcggttctggagggccaggaacaaacaggcttcaaagcaagggcttggctggcacacaggggcttggtccttcacctctgtccctctcctacggacacatataagaccctggtcacacctgggagaggaggagaggagagcatagcacctgcagcaagatggatgtgggcagcaaagaggtcctgatggagagcccgccggtgagtgtggttgcgtgtgtgtatgtatgtgcgcgcgcacatgtgtgtgatggccctgcctcctctatcctccctggcctgtttccttatccagatccattcactcaactaacctaggactgtgataagtcaggatggggacaccaagaccactaagccagggacccttggggagctgtttgtggccaagagccactataggggtccgtagaactggagtgcgcgtagacagccctgagtcagaagccatgagaaacttcagaagtcaggggacacttctcagagaaaaaccacatacgagctggagccagaataaggaggagctcgcccggtggagaaggaggaaggcattccaggaaggagggagactctgtatcaccgcatggaggtgatcacttggggagagagaggggctgaccatggctgggggaagcagcagggagagacaggtgaagcaggctctcttgggtccctcaaaactagaccctgcttctaagcttctatgtatctatgggtttgttagaatccaggccacctcctccaagaagccttctctgatctcctcagcccttccctgtccatccatcgcatcggctgtccagcctaggagccgtgggagggtgttcagcttgtatagggagaagaggggacagcctcatgacctcatgcctgtctccttgcctgccccaccgtgtcaggactactccgcagctccccggggccgatttggcattccctgctgcccagtgcacctgaaacgccttcttatcgtggtggtggtggtggtcctcatcgtcgtggtgattgtgggagccctgctcatgggtctccacatgagccagaaacacacggagatggtgagaggtgtgggatgcacagcagtgggcacaggacatgccagacagaggggctaggtgggatgggcgataggaaactgtccaaggggagtggaggggaggaggcaaggggcacagctagaaggaaagaggcacgaaccaggcagcaacccagctcaggcttttccacaaggcccctgcccgcgacaggacagccagctccctccagcacctggttccactcagcctccctgaactcttgggaaagagggaagcgcatttgagtacagaggcctgagtatggggatgggtaccactggctgagtaggaaaggggaagaccaggtggctccatgcctttccccaggttctggagatgagcattggggcgccggaagcccagcaacgcctggccctgagtgagcacctggttaccactgccaccttctccatcggctccactggcctcgtggtgtatgactaccagcaggtgggtatgccagacctcctgacctggaccaatgacaactgggctctgctagagcgcccagctggccactttcattccacatccatctctcctctctcagactttttgctgagcccagattctagtagtctcccgtgcccaacctagagggaggtggctaaggacctgggtcagggagagagcagggcaggaccccgaatgatctccagcattctgtgcctagctgctgatcgcctacaagccagcccctggcacctgctgctacatcatgaagatagctccagagagcatccccagtcttgaggctctcactagaaaagtccacaacttccaggtgtgtgtgtgtgggtgaaaagagtgggctgtctccctcccaggctgctggaggagtgtccgaatggtggctatttgtcacctgtaaagcactgttcctcattggctgccagctgactgcccctctcctattcccctgcacgactcctttccttcccaccccactgccaagctgctgggctcagctgagtccactcactacctggtggcttctgactctagcacagcccctctttactgatgagaaaactgaggctcagagagattgcctgatatacctgaagtcccacaataagggctgcacatgggatagaaactcacttcctacattccagatggaatgctctctgcaggccaagcccgcagtgcctacgtctaagctgggccaggcagaggggcgagatgcaggctcagcaccctccggaggggacccggccttcctgggcatggccgtgaacaccctgtgtggcgaggtgccgctctactacatctaggacgcctccggtgagcaggtgtgatcccagggcccctgatcagcagcggaggagcgctggccacctgcccggctgtggaggaggctcgctgaccaggctggggcgtccactgaagcggggtcatccaggcaactcgggggaggggaagctcacagaccggtacttcccactcccctgaattctctctgtccatcctcaacattcctttgcttcatagggtcagtggaagccccaacggaaaggaaacgccccgggcaaagggtcttttgcagcttttgcagacgggcaagaagctgcttctgcccacaccgcagggacaaaccctggagaaatgggagcttggggagaggatgggagtgggcagaggtggcacccaggggcccgggaactcctgccacaacagaataaagcagcctgatttgaaaagcaaagggtctgcttctgtcttcctgcagggcgcagtcctcgctggcggggccggccaagaagggaagggccttgggagagcaaagtggggtttccattcgccctctgtcccagggcgctggcactgtccacctcggcggggagaggggctcgcagggagcatccacgggcttt

SEQ ID NO: 502 - DNA, 2085 bp, Homo sapiens
gcatttcttccttctgcgtatgggacaggaccctttctggaatgggggtcttatgacctacaatcaaacaagaacatggacttcccgtgcctctggctagggctgttgctgcctttggtagctgcgctggatttcaactaccaccgccaggaagggatggaagcgtttttgaagactgttgcccaaaactacagttctgtcactcacttacacagtattgggaaatctgtgaaaggtagaaacctgtgggttcttgttgtggggcggtttccaaaggaacacagaattgggattccagagttcaaatacgtggcaaatatgcatggagatgagactgttgggcgggagctgctgctccatctgattgactatctcgtaaccagtgatggcaaagaccctgaaatcacaaatctgatcaatagtacccggatacacatcatgccttccatgaacccagatggatttgaagccgtcaaaaagcctgactgttactacagcatcggaagggaaaattataaccagtatgacttgaatcgaaatttccccgatgcttttgaatataataatgtctcaaggcagcctgaaactgtggcagtcatgaagtggctgaaaacagagacgtttgtcctctctgcaaacctccatggtggtgccctcgtggccagttacccatttgataatggtgttcaagcaactggggcattatactcccgaagcttaacgcctgatgatgatgtttttcaatatcttgcacatacctatgcttcaagaaatcccaacatgaagaaaggagacgagtgtaaaaacaaaatgaactttcctaatggtgttacaaatggatactcttggtatccactccaaggtggaatgcaagattacaactacatctgggcccagtgttttgaaattacgttggagctgtcatgctgtaaatatcctcgtgaggagaagcttccatccttttggaataataacaaagcctcattaattgaatatataaagcaggtgcacctaggtgtaaagggtcaagtttttgatcagaatggaaatccattacccaatgtaattgtggaagtccaagacagaaaacatatctgcccctatagaaccaacaaatatggagagtattatctccttctcttgcctgggtcttatattataaatgttacagtccctggacatgatccacacatcacaaaggtgattattccggagaaatcccagaacttcagtgctcttaaaaaggatattctacttccattccaagggcaattggattctatcccagtatcaaatccttcatgcccaatgattcctctatacagaaatttgccagaccactcagctgcaacaaagcctagtttgttcttatttttagtgagtcttttgcacatattcttcaaataaagtaaaatgtgaaactcaacccacatcaccacctggaatcagggattgctcactccaggttactgcaaccctaactcactctagtgggaccttgactggagaaactccacgatcttcctgaagaagagaaatggatgtttccaaattccacaataagcaatatgtggtgataatgaaaagaatgattcagtcttgacggtgaatggaagacacttacctaacaagtactgctcatttacactcaaattaatcttgaagtagtcttaaaatgtgtaagaagttaaaacttgagaagcaaaaaatgcctgcaaaaagaagatcattttgtatacagagaaccggatgaatataagcaatgaagatgaacatttattgatcttctacatacaagacttcaccataaggccaggagcagtgctcacgccttgtaatcccagcactttgggaggccaaggtgggcggatcaccttgaggtcaggagttcaagaccagcctgaccaacatggtgaaaccctgtctctactaaatattagcggggtgtggtggcgggcacctgtagtcgcagcctttcgggaggctgagacaggagaatcgcttgaaccctagaggcggagtttgcagtgagccgagatagtgccattgtactccagcttgggcaacagagtaagactctgtctc

SEQ ID NO: 503 - DNA, 2595 bp, Homo sapiens; identical to SEQ ID NO: 211

SEQ ID NO: 504 - DNA, 1914 bp, Homo sapiens
gcagccaggcgcgcactgcacagctctcttctctcgccgccgcccgagcgcacccttcagcccgcgcgccggccgtgagtcctcggtgctcgcccgccggccagacaaacagcccgcccgaccccgtcccgaccctggccgccccgagcggagcctggagcaaaatgatgcttcaacacccaggccaggtctctgcctcggaagtgagtgcttctgccatcgtcccctgcctgtcccctcctgggtcactggtgtttgaggattttgctaacctgacgccctttgtcaaggaagagctgaggtttgccatccagaacaagcacctctgccaccggatgtcctctgcgctggaatcagtcactgtcagcgacagacccctcggggtgtccatcacaaaagccgaggtagcccctgaagaagatgaaaggaaaaagaggcgacgagaaagaaataagattgcagctgcaaagtgccgaaacaagaagaaggagaagacggagtgcctgcagaaagagtcggagaagctggaaagtgtgaatgctgaactgaaggctcagattgaggagctcaagaacgagaagcagcatttgatatacatgctcaaccttcatcggcccacgtgtattgtccgggctcagaatgggaggactccagaagatgagagaaacctctttatccaacagataaaagaaggaacattgcagagctaagcagtcgtggtatgggggcgactggggagtcctcattgaatcctcattttatacccaaaaccctgaagccattggagagctgtcttcctgtgtacctctagaatcccagcagcagagaaccatcaaggcgggagggcctgcagtgattcagcaggcccttcccattctgccccagagtgggtcttggaccagggcaagtgcatctttgcctcaactccaggatttaggccttaacacactggccattcttatgttccagatggcccccagctggtgtcctgcccgcctttcatctggattctacaaaaaaccaggatgcccaccgttagattcaggcagcagtgtctgtacctcgggtgggagggatggggccatctccttcaccgtggctaccattgtcactcgtaggggatgtggagtgagaacagcatttagtgaagttgtgcaacggccagggttgtgctttctagcaaatatgctgttatgtccagaaattgtgtgtgcaagaaaactaggcaatgtactcttccgatgtttgtgtcacacaacactgatgtgacttttatatgctttttctcagatctggtttctaagagttttggggggcggggctgtcaccacgtgcagtatctcaagatattcaggtggccagaagagcttgtcagcaagaggaggaacagaattctcccagcgttaacacaaaatccatgggcagcatgatggcaggtcctctgttgcaaactcagttccaaagtcacaggaagaaagcagaaagttcaacttccaaagggttaggactctccactcaatgtcttaggtcaggagttgtgtctaggctggaagagccaaagaaatattccattttcctttccttgtggttgaaaccacagtcagtggagagatgtttggaacacagtcagtggagctggtggtaccaggtttagcattattggatgtcaaaagcattttttttgtcatgtagctgttttaagaaatctggcccagggtgtttgcagctgtgagaagtcactcacactggccacaaggacgctggctactgtctattaaaattctgatgtttctgtgaaattctcagagtgtttaattgtactcaatggtatcattacaattttctgtaagagaaaatattacttatttatcctagtattcctaacctgtcagaataataaatattgtggtaaaa

SEQ ID NO: 505 - DNA, 3777 bp, Homo sapiens
tggctgagtggctactctcggcttcctggcaacgccgagcgaaagctatgactgcggccgcgggttcggcgggccgcgccgcggtgcccttgctgctgtgtgcgctgctggcgcccggcggcgcgtacgtgctcgacgactccgacgggctgggccgggagttcgacggcatcggcgcggtcagcggcggcggggcaacctcccgacttctagtaaattacccagagccctatcgttctcagatattggattatctctttaagccgaattttggtgcctctttgcatattttaaaagtggaaataggtggtgatgggcagacaacagacggcactgagccctcccacatgcattatgcactagatgagaattatttccgaggatacgagtggtggttgatgaaagaagctaagaagaggaatcccaatattacactcattgggttgccatggtcattccctggatggctgggaaaaggtttcgactggccttatgtcaatcttcagctgactgcctattatgtcgtgacctggattgtgggcgccaagcgttaccatgatttggacattgattatattggaatttggaatgagaggtcatataatgccaattatattaagatattaagaaaaatgctgaattatcaaggtctccagcgagtgaaaatcatagcaagtgataatctctgggagtccatctctgcatccatgctccttgatgccgaacttttcaaggtggttgatgttataggggctcattatcctggaacccattcagcaaaagatgcaaagttgactgggaagaagctttggtcttctgaagactttagcactttaaatagtgacatgggtgcaggctgctggggtcgcattttaaatcagaattatatcaatggctatatgacttccacaatcgcatggaatttagtggctagttactatgaacagttgccttatgggagatgcgggttgatgacggcccaagagccatggagtgggcactacgtggtagaatctcctgtctgggtatcagctcataccactcagtttactcaacctggctggtattacctgaagacagttggccatttagagaaaggaggaagctacgtagctctgactgatggcttagggaacctcaccatcatcattgaaaccatgagtcataaacattctaagtgcatacggccatttcttccttatttcaatgtgtcacaacaatttgccacctttgttcttaagggatcttttagtgaaataccagagctacaggtatggtataccaaacttggaaaaacatccgaaagatttctttttaagcagctggattctctatggctccttgacagtgatggcagtttcacactgagcctgcatgaagatgagctgttcacactcaccactctcaccactggtcgcaaaggcagctacccgcttcctccaaaatcccagcccttcccaagtacctataaggatgatttcaatgttgattacccattttttagtgaagctccaaactttgctgatcaaactggtgtatttgaatattttacaaatattgaagaccctggcgagcatcacttcacgctacgccaagttctcaaccagagacccattacgtgggctgccgatgcatccaacacaatcagtattataggagactacaactggaccaatctgactataaagtgtgatgtttacatagagacccctgacacaggaggtgtgttcattgcaggaagagtaaataaaggtggtattttgattagaagtgccagaggaattttcttctggatttttgcaaatggatcttacagggttacaggtgatttagctggatggattatatatgctttaggacgtgttgaagttacagcaaaaaaatggtatacactcacgttaactattaagggtcatttcgcctctggcatgctgaatgacaagtctctgtggacagacatccctgtgaattttccaaagaatggctgggctgcaattggaactcactcctttgaatttgcacagtttgacaactttcttgtggaagccacacgctaatacttaacagggcatcatagaatactctggattttcttcccttctttttggttttggttcagagccaattcttgtttcattggaacagtatatgaggcttttgagactaaaaataatgaagagtaaaaggggagagaaatttatttttaatttaccctgtggaagattttattagaattaattccaaggggaaaactggtgaatctttaacattacctggtgtgttccctaacattcaaactgtgcattggccatacccttaggagtggtttgagtagtacagacctcgaagccttgctgctaacacctgaggtagctctcttcatcttatttgcgagcggtctctgtagagtggcagtaacttgatcatcactgagatgtattgtatgcatgctgaccgtgtgtccaagtgagccagtgtctgtcatcacaagatgatgctgccataatagaaagctgaagaacactagaagtagcttcttgaaaaccacttcaacctgttatgctttatgctctaaaaagtatttttttattttcctttttaagatgatacttttgaaatgcaggatatggatgagtgggatgattttaaaaacgcctgtttaataaactacctctaacactatttctgcggtaatagatattagcagattaattgggttatttgcattatttaatttttttgattccaaggttttggtcttgtaaccactatcactctctgtgaacgtttttccaggtggctggaagaaggaagaaaacctgatatagccaatgctgttgtagtcgtttcctcagcctcatctcactgtgctgtggtctgtcctcacatgtgcactggtaacagactcacacagctgatgaatgcttttctctccttatgtgtggaaggaggggagcacttagacatttgctaactcccagagttggatcatctcctaagatgtacttactttttaaagtccaaatatgtttatatttaaatatacgtgagcatgttcatcatgttgtatgatttatactaagcattaatgtggctctatgtagcaaatcagttattcatgtaggtaaagtaaatctagaattatttataagaattactcattgaactaattctactatttaggaatttgtaagagtctaacataggcttagctacagtgaagttttgcattgcttttgaagacaagaaaagtgctagaataaataagattacagagaaaattttttgttaaaaccaagtgatttccagctgatgtatctaatattttttaaaacaaacattatagaggtgtaatttatttacaataaaatgttcctactttaaatatacaattcagtgagttttgataaattgatatacccatgtaaccaacactccagtcaagcttcagaatatttccatcaccccagaaggttctcttgtatacctgctcagtcagttcctttcactcccaattgttggcagccattgataggaattctatcactataggttagttttctttgttccagaacatcatgaaagcggcgtcatgtactgtgtattcttatgaatggtttctttccatcagcataatgctttgagattggtccatgttgtgtgattcagtggtttgttccttcttatttctgaaaagttttccattgtatgaatataccacaatttgtttcctccccaccagtttctgatactacaattaaaactgtctacatttac

SEQ ID NO: 506 - DNA, 1757 bp, Homo sapiens
cagcatgaaggcactcctggccctgccgctgctgctgcttctctccacgcccccgtgtgccccccaggtctccgggatccgaggagatgctctggagaggttttgccttcagcaacccctggactgtgacgacatctatgcccagggctaccagtcagacggcgtgtacctcatctacccctcgggccccagtgtgcctgtgcccgtcttctgtgacatgaccaccgagggcgggaagtggacggttttccagaagagattcaatggctcagtaagtttcttccgcggctggaatgactacaagctgggcttcggccgtgctgatggagagtactggctggggctgcagaacatgcacctcctgacactgaagcagaagtatgagctgcgagtggacttggaggactttgagaacaacacggcctatgccaagtacgctgacttctccatctccccgaacgcggtcagcgcagaggaggatggctacaccctctttgtggcaggctttgaggatggcggggcaggtgactccctgtcctaccacagtggccagaagttctctaccttcgaccgggaccaggacctctttgtgcagaactgcgcagctctctcctcaggagccttctggttccgcagctgccactttgccaacctcaatggcttctacctaggtggctcccacctctcttatgccaatggcatcaactgggcccagtggaagggcttctactactccctcaaacgcactgagatgaaaatccgccgggcctgaagggctggccccctcaggcacctttcctcccctggacacccatggtctccatgagtgctccctctgctgcccctgatgcatgcttctgctgattcccgagcaccaactccttacaagggggccttgtggctctcagccatgccacatccctgtcacacacccagggcatccattcctaagccagacccggctcccctacacctgaagttacactgccagcagttccccaggcctcttccgagaggcacatggttctagcctggacctggctgggctccatgagaatgagttgcctccaccctgtcccaacagctgacagccaggagccactctcccagctgcaggcctttgtggtgcatcttgtcctgcttcctcactgtggacccctgtctgggccaccctagtgtgctaagctgagcagtgcagtgtgaacagggcccatggtgtattctaggccacagcccagcactcctctgggctgctctcaaaccatgtcccatcttcagcatccctcccaccaacttactcccctgtggtgagtaccgtggaaccccagcccacctcactatcatactcagcttcccctgatggcccatcccagcccctgaagctctatgccaagaacacagctaccgcacaccaccctgaaacagccacagccaaggtaggcatgcatatgaggtcttccccataccctctgggtgttgagaggtttagccacatgagggagcagaggacaatctctgcagggctgggagtgggtagggactgaaggtctcaataaaccttcagaacctgaatgaactggcttcatacacacaaacatatttgtttatcccccaaatgtaggcacctggctcctccttgctcccctgctgatggtgtcctaccccgaactccaaaaattacacctggagtcaggtgcagaagggaaccttgtatttcacaggcctcattttgatggcaaaaagacagtgtaataata

SEQ ID NO: 507 - DNA, 3915 bp, Homo sapiens
gtggggtggggtggggctgggggcttgtcgccctttcaggctccaccctttgcggagattataaatagtcatgatcccagcgagacccagagatgcctgtaatggtgagactttggatccttcctgaggacgtggagaaaactttctgctgagaaggacattttgaaggttttgttggctgaaaaagctgtttctggaatcacccctagatctttcttgaagacttgaattagattacagcgatggggacacagaaggtcaccccagctctgatatttgccatcacagttgctacaatcggctctttccaatttggctacaacactggggtcatcaatgctcctgagaagatcataaaggaatttatcaataaaactttgacggacaagggaaatgccccaccctctgaggtgctgctcacgtctctctggtccttgtctgtggccatattttccgtcgggggtatgatcggctccttttccgtcggactcttcgtcaaccgctttggcaggcgcaattcaatgctgattgtcaacctgttggctgtcactggtggctgctttatgggactgtgtaaagtagctaagtcggttgaaatgctgatcctgggtcgcttggttattggcctcttctgcggactctgcacaggttttgtgcccatgtacattggagagatctcgcctactgccctgcggggtgcctttggcactctcaaccagctgggcatcgttgttggaattctggtggcccagatctttggtctggaattcatccttgggtctgaagagctatggccgctgctactgggttttaccatccttcctgctatcctacaaagtgcagcccttccattttgccctgaaagtcccagatttttgctcattaacagaaaagaagaggagaatgctaagcagatcctccagcggttgtggggcacccaggatgtatcccaagacatccaggagatgaaagatgagagtgcaaggatgtcacaagaaaagcaagtcaccgtgctagagctctttagagtgtccagctaccgacagcccatcatcatttccattgtgctccagctctctcagcagctctctgggatcaatgctgtgttctattactcaacaggaatcttcaaggatgcaggtgttcaagagcccatctatgccaccatcggcgcgggtgtggttaatactatcttcactgtagtttctctatttctggtggaaagggcaggaagaaggactctgcatatgataggccttggagggatggctttttgttccacgctcatgactgtttctttgttattaaaggataactataatgggatgagctttgtctgtattggggctatcttggtctttgtagccttctttgaaattggaccaggccccattccctggtttattgtggccgaactcttcagccagggcccccgcccagctgcgatggcagtggccggctgctccaactggacctccaacttcctagtcggattgctcttcccctccgctgctcactatttaggagcctacgtttttattatcttcaccggcttcctcattaccttcttggcttttaccttcttcaaagtccctgagacccgtggcaggacttttgaggatatcacacgggcctttgaagggcaggcacacggtgcagatagatctggaaaggacggcgtcatggagatgaacagcatcgagcctgctaaggagaccaccaccaatgtctaagtcgtgcctccttccacctccctcccggcatgggaaagccacctctccctcaacaagggagagacctcatcaggatgaacccaggacgcttctgaatgctgctacttaattcctttctcatcccacgcactccatgagcaccccaaggctgcggtttgttggatcttcaatggctttttaaattttatttcctggacatcctcttctgcttaggagagaccgagtgaacctaccttcatttcaggagggattggccgcttggcacatgacaactttgccagcttttcctcccttgggttctgatattgccgcactaggggatataggagaggaaaagtaaggtgcagttcccccaacctcagacttaccaggaagcagatacatatgagtgtggaagccggagggtgtttatgtaagagcaccttcctcacttccatacagctctacgtggcaaattaacttgagttttatttattttatcctctggtttaattacataatttttttttttttactttaagtttcaggatacatgtgccgaatgtgcaggtttgttacataggtatatatatgccatgatggaaatatttatttttttaagcgtaattttgccaaataataaaaacagaaggaaattgagattagagggaggtgtttaaagagaggttatagagtagaagatttgatgctggagaggttaaggtgcaataagaatttagggagaaatgttgttcattattggagggtaaatgatgtggtgcctgaggtctgtacgttacctcttaacaatttctgtccttcagatggaaactctttaacttctcgtaaaagtcatatacctatataataaagctactgatttccttggagcttttttctttaagataatagtttacatgtagtagtacttgaaatctaggattattaactaatatgggcattgtagttaatgatggttgatgggttctaattttggatggagtccagggaagagaaagtgatttctagaaagcctgttcccctcactggatgaaataactccttcttgtagtagtctcattacttttgaagtaatcccgccacctatctcgtgggagagccatccaaataagaaacctaaaataattggttcttggtagagattcattatttttccactttgttctttaggagattttaggtgttgattttctgttgtattttaactcatacctttaaaggaattccccaaagaatgtttatagcaaacttggaatttgtaacctcagctctgggagaggatttttttctgagcgattattatctaaagtgtgttgttgctttaggctcacggcacgcttgcgtatgtctgttaccatgtcactgtggtcctatgccgaatgccctcaggggacttgaatctttccaataaaccaggtttagacagtatgagtcaatgtgcagtgtagcccacacttgagaggatgaatgtatgtgcactgtcactttgctctgggtggaagtacgttattgttgacttattttctctgtgtttgttcctacagcccctttttcatatgttgctcagtctccctttcccttcttggtgcttacacatctcagaccctttagccaaacccttgtcagtgacagtattttggttcttagttctcactgttccctctgctcctggagcctttgaataaaaatgcacgtagctgaggccggatgcggtggctcacgcctgtaatcccagcactttgggaggcctaggcgggcggtcaggggttcgagaccagtctggccaacatcgtgaaaccctgtctctactaaaaatgcaaaaattagccgggcgtggtggcgggcgcctgtaatcccagctacttgggaagctgaggcgggagaatcatgtgaacccgggacgcaggggttgcagtgagcggagatcgcatcattgcactctagcctgggccacagggcgagactccgtctcaaaaaaaaaaaaatgcacatagctatcgagtgtgctttagcttgaaaaggtgaccttgcaacttcatgtcaactttctggctcctcaaacagtaggttggcagtaaggcagggtcccatttctcactgagaagattgtgaatatttccatatggattttctattgttactctggttctttgttttaaaataaaaattctgaatgtacacg

SEQ ID NO: 508 - DNA, 397 bp, Homo sapiens
cttgccccctccctccccagagcctgtgtcggacagccagatggtcatcatagtcacggtggtgtcggtgttgctgtccctgttcgtgacatctgtcctgctctgcttcatcttcggccagcacttgcgccagcagcggatgggcacctacggggtgcgagcggcttggaggaggctgccccaggccttccggccatagcaaccatgagtggcatggccaccaccacggtggtcactggaactcagtgtgactcctcagggttgaggtccagccctggctgaaggactgtgacaggcagcagagacttgggacattgccttttctagcccgaatacaaacacctggacttagccctgtgcccacagtgtctcctcctgggataacaatggccaggga

SEQ ID NO: 509 - DNA, 1341 bp, Homo sapiens
gaattccggcgaccgtgtgggatgaggccgagcaagatggaattggggaggaggtgctcaagatgtccacggaggagatcatccagcgcacacggctgctggacagtgagatcaagatcatgaagagtgaagtgttgagagtcacccatgagctccaagccatgaaggacaagataaaagagaacagtgagaaaatcaaagtgaacaagaccctgccgtaccttgtctccaacgtcatcgagctcctggatgttgatcctaatgaccaagaggaggatggtgccaatattgacctggactcccagaggaagggcaagtgtgctgtgatcaaaacctctacacgacagacgtacttccttcctgtgattgggttggtggatgctgaaaagctaaagccaggagacctggtgggtgtgaacaaagactcctatctgatcctggagacgctgcccacagagtatgactcgcgggtgaaggccatggaggtagacgagaggcccacggagcaatacagtgacattgggggtttggacaagcagatccaggagctggtggaggccattgtcttgccaatgaaccacaaggagaagtttgagaacttggggatccaacctccaaaaggggtgctgatgtatgggcccccagggacggggaagaccctcctggcccgggcctgtgccgcacagactaaggccaccttcctaaagctggctggcccccagctggtgcagatgttcattggagatggtgccaagctagtccgggatgcctttgccctggccaaggagaaagcgccctctatcatcttcattgatgagttggatgccatcggcaccaagcgctttgacagtgagaaggctggggaccgggaggtgcagaggacaatgctggagcttctgaaccagctggatggcttccagcccaacacccaagttaaggtaattgcagccacaaacagggtggacatcctggaccccgccctcctccgctcgggccgccttgaccgcaagatagagttcccgatgcccaatgaggaggcccgggccagaatcatgcagatccactcccgaaagatgaatgtcagtcctgacgtgaactacgaggagctggcccgctgcacagatgacttcaatggggcccagtgcaaggctgtgtgtgtggaggcgggcatgatcgcactggccaggggtgccacggagctcacccacgaggactacatggaaggcatcctggaggtgcaggccaagaagaaagccaacctacaatactacgcctaggcacacaggccagccccagtctcacggctgaagtgcgcaataaaagatggtttagggggaattc

SEQ ID NO: 510 - DNA, 4567 bp, Homo sapiens; identical to SEQ ID NO: 219

SEQ ID NO: 511 - DNA, 428 bp, Homo sapiens
tcttttaggagacccccgaaggctgtgaacaagtgctcacaggcaaaagactcatgcagtgtctcccaaacccagaggatgtgaaaatggccctggaggtatataagctgtctctggaaattgaacaactggaactacagagagacagcgcaagacaatccactttggataaagaactataatttttctcaaaagaaggaggaaaaggtgtcttgctggcttgcctcttgcaattcaatacagatcagtttagcaaatctactgtcaatttggcagtgatattcatcataataaatatctagaaatgataatttgctaaagtttagtgctttgagattgtgaaattattaatcatcctctgtgtggctcatgtttttgcttttcaacacacaaagcacaaattttttttcgattaaaaatgtatgtat

SEQ ID NO: 512 - DNA, 1121 bp, Homo sapiens
ggaattccctatagagccgggtgagagagcgagcgcccgtcggcgggtgtcgagggcgggttgcctcgcgctgacccttcccgccctccttctcgtcacacaccaggtccccgcggaagccgcggtgtcggcgccatggcggagctgacggctcttgagagtctcatcgagatgggcttccccaggggacgcgcggagaaggctctggccctcacagggaaccagggcatcgaggctgcgatggactggctgatggagcacgaagacgaccccgatgtggacgagcctttagagactccccttggacatatcctgggacgggagcccacttcctcagagcaaggcggccttgaaggatctgcttctgctgccggagaaggcaaacccgctttgagtgaagaggaaagacaggaacaaactaagaggatgttggagctggtggcccagaagcagcgggagcgtgaagaaagagaggaacgggaggcattggaacgggaacggcagcgcaggagacaagggcaagagttgtcagcagcacgacagcggctacaggaagatgagatgcgccgggctgctgctgaggagaggcggagggaaaatgccgaggagttagcagccagacaaagagttagagaaaagatcgagagggacaaagcagagagagccaagaagtatggtggcagtgtgggctctcagccacccccagtggcaccagagccaggtcctgttccctcttctcccagccaggagcctcccaccaagcgggagtatgaccagtgtcgcatacaggtcaggctgccagatgggacctcactgacccagacgttccgggcccgggaacagctggcagctgtgaggctctatgtggagctccaccgtggggaggaactaggtgggggccaggaccctgtgcaattgctcagtggcttccccagacgggccttctcagaagctgacatggagcggcctctgcaggagctgggactcgtgccttctgctgttctcattgtggccaagaaatgtcccagctgagggcctttgtcccattgtccctctgtgaccccttcatctttgataaagcactgacatctccttcctaataaatagaccctgagttctgt

SEQ ID NO: 513 - DNA, 341 bp, Homo sapiens
aggagaagggaggtgactccggcggaagaggacaaggcagaatgcaggcccttcgggtgtcccaggcgctgatccgctccttcagctccaccgcccggaaccgctttcagaaccgagtgcgcgagaaacagaagctcttccaggaggacaatgacatcccgttgtacctgaagggcggcatcgttgacaacatcctgtaccgagtgacaatgacgctgtgtctgggcggcactgtctacagcttgtactcccttggctgggcctccttccccaggaattaagaccaagaagcctggggggcctgagagacttgaacaagtgtcaataaacgctggcctctg

SEQ ID NO: 514 - DNA, 691 bp, Homo sapiens
gacccctcacactcacctagccaccatggacatcgccatccaccacccctggatccgccgccccttctttcctttccactcccccagccgcctctttgaccagttcttcggagagcacctgttggagtctgatcttttcccgacgtctacttccctgagtcccttctaccttcggccaccctccttcctgcgggcacccagctggtttgacactggactctcagagatgcgcctggagaaggacaggttctctgtcaacctggatgtgaagcacttctccccagaggaactcaaagttaaggtgttgggagatgtgattgaggtgcatggaaaacatgaagagcgccaggatgaacatggtttcatctccagggagttccacaggaaataccggatcccagctgatgtagaccctctcaccattacttcatccctgtcatctgatggggtcctcactgtgaatggaccaaggaaacaggtctctggccctgagcgcaccattcccatcacccgtgaagagaagcctgctgtcaccgcagcccccaagaaatagatgccctttcttgaattgcattttttaaaacaagaaagtttccccaccagtgaatgaaagtcttgtgactagtgctgaagcttattaatgctaagggcaggcccaaattatcaagctaataaaatatcattcagcaac

SEQ ID NO: 515 - DNA, 2304 bp, Homo sapiens
ttggagctgccgccgccgggactcccgtcccagcaggacatggatttgattgacatactttggaggcaagatatagatcttggagtaagtcgagaagtatttgacttcagtcagcgacggaaagagtatgagctggaaaaacagaaaaaacttgaaaaggaaagacaagaacaactccaaaaggagcaagagaaagcctttttcactcagttacaactagatgaagagacaggtgaatttctcccaattcagccagcccagcacacccagtcagaaaccagtggatctgccaactactcccaggttgcccacattcccaaatcagatgctttgtactttgatgactgcatgcagcttttggcgcagacattcccgtttgtagatgacaatgaggtttcttcggctacgtttcagtcacttgttcctgatattcccggtcacatcgagagcccagtcttcattgctactaatcaggctcagtcacctgaaacttctgttgctcaggtagcccctgttgatttagacggtatgcaacaggacattgagcaagtttgggaggagctattatccattcctgagttacagtgtcttaatattgaaaatgacaagctggttgagactaccatggttccaagtccagaagccaaactgacagaagttgacaattatcatttttactcatctataccctcaatggaaaaagaagtaggtaactgtagtccacattttcttaatgcttttgaggattccttcagcagcatcctctccacagaagaccccaaccagttgacagtgaactcattaaattcagatgccacagtcaacacagattttggtgatgaattttattctgctttcatagctgagcccagtatcagcaacagcatgccctcacctgctactttaagccattcactctctgaacttctaaatgggcccattgatgtttctgatctatcactttgcaaagctttcaaccaaaaccaccctgaaagcacagcagaattcaatgattctgactccggcatttcactaaacacaagtcccagtgtggcatcaccagaacactcagtggaatcttccagctatggagacacactacttggcctcagtgattctgaagtggaagagctagatagtgcccctggaagtgtcaaacagaatggtcctaaaacaccagtacattcttctggggatatggtacaacccttgtcaccatctcaggggcagagcactcacgtgcatgatgcccaatgtgagaacacaccagagaaagaattgcctgtaagtcctggtcatcggaaaaccccattcacaaaagacaaacattcaagccgcttggaggctcatctcacaagagatgaacttagggcaaaagctctccatatcccattccctgtagaaaaaatcattaacctccctgttgttgacttcaacgaaatgatgtccaaagagcagttcaatgaagctcaacttgcattaattcgggatatacgtaggaggggtaagaataaagtggctgctcagaattgcagaaaaagaaaactggaaaatatagtagaactagagcaagatttagatcatttgaaagatgaaaaagaaaaattgctcaaagaaaaaggagaaaatgacaaaagccttcacctactgaaaaaacaactcagcaccttatatctcgaagttttcagcatgctacgtgatgaagatggaaaaccttattctcctagtgaatactccctgcagcaaacaagagatggcaatgttttccttgttcccaaaagtaagaagccagatgttaagaaaaactagatttaggaggatttgaccttttctgagctagtttttttgtactattatactaaaagctcctactgtgatgtgaaatgctcatactttataagtaattctatgcaaaatcatagccaaaactagtatagaaaataatacgaaactttaaaaagcattggagtgtcagtatgttgaatcagtagtttcactttaactgtaaacaatttcttaggacaccatttgggctagtttctgtgtaagtgtaaatactacaaaaacttatttatactgttcttatgtcatttgttatattcatagatttatatgatgatatgacatctggctaaaaagaaattattgcaaaactaaccacgatgtacttttttataaatactgtatggacaaaaaatggcattttttataattaaattgtttagctctggcaaaaaaaaaaaattttttaagagctggtactaataaaggattattatgactgttaaaaaaaaaaaaaaaaaa

SEQ ID NO: 516 - DNA, 4995 bp, Homo sapiens
aattctggaagggtcccttttattcaactgcttcaatccaggggcccccgaagtctgaccacagcaatgctccaaaccatgtgtctttcctggcttaaggttcagtcgccctcctcagaggggagcctatgaaagagcccagtggagtgtcagggtcctgagtcctagtcctagtcctgtccctgccacttgtgagggaacttgggcctcagtttctccaggtgggctccacaattgcttctcttgatctggactgccccagtgcccaggttcagtgagtgacacaggcagctgggtttccacatcctctgacttgggttcccttcactgcctccaggcaggctcggccctccaccccaagtggcccattgtgtgagctcagtttcagtggggacagaaactgggttgagaaaagggaatatttacctatcccaccaagccaatgccaagtaaatagtgcagtatcttatgtagagcccttgccctgcccttccccatctgggtgctgctgcctagagcatataaaaggcaccttgctgggcatgtctcatactagcccaccagactcagagacggaaccagagacaggccagagcatccccctcctccaccatgaaactcgctgtcaccctcaccctggtcacactggctctctgctgcagctccggtgagtgctcagagacccttccctccctcctggacttaggaactctcaggaccccccagttctgctcagaagaaggagtgagctgcccattcctgctctggagctgctgggaggacctgggcatgctgagtctcagaaaactgggtctggtgagcaagctcatcttggaaacttggagagagcccaggctgtaaggaagcctaaaaagggtcccatcttctatatcaacaaccctcagaatcccagggaatggaatagcctggagggaggagtggagaataccccataaagatgagtactccagcataggaataatgaggccctcatcccagatctggacagactccaagattctgagaccttggtgcagcctccaagtctggggtctccactccatctggcagctgaagtcactggaaggggagctgcagggactcgtgaccccaaaagaaacccaacccaagacaaggtctctcattctgggcacagaggaatatccagaaagagagcttccctttgggaactgccaacccagagtgaagttttctaaacatttccgtcctctgcaaaagggattaggagtctctgagtagttgctgctgtcactaaaaggaaaagaactgtggggggaagaggggcaaaaagagagacggagagagggggagaaaggaaggaaagaaggatcacagctctctccaagatcccccgtctttggggaactgggttatctaactctgtttttcactctgcgtcagcctcttccatctcactgaaaatgctgttgttattttttaataaacaaactccaattaattcacttggaaagcttcacaacacccatggagataagtttttatgaccctggggagttagaaaacccaaaccaagaagcagtaggaacaactatttgcagagaggtttatttgtttttcagagaaaatgacatcattttggactgaaatgtgtattaattagaagatctcagtgctgtctgcgtacagaggtgggtggctgagcaagataggactgcaacatattaaggggtgggtcagagatcatttgtctattgtgtgcactgcatacatatttaacacttctcacacatgtgccaatcactgtcaccctttcaataatatctcttttcattcttttttttttttttttttgagacagagtctcgctctgttgccaggctgggtgcagtggcgcgatctcagctcactgcaacctccgcctcccgggttcaagcgattctcctgcctcagcctccagtaggtgggttacaggcacgcaccactgcacccagctaatttttgtatttttagtagagacagggtttcacacatgttggccagatggtctccatctcttgacctctggatccaccacctagcctcccaagtgctgggttagcgtgagccaccatgcctggcctctcttttattcttacaacaaccctatgaagtaggatattgggccaggcacggtctgcacgcctgtaatcccagcaatttgggaggccgagtgggtagatcacttgaggtcaggagttcaggaccaacctggccaacatggtgaaaccttgtctctattaaaaatacaaaaattagccaggcatggtggcgcatgcctgtagtcccagctacttgggaggccgaggcaggagaatcacttgaacctgggaggcagaggttgcagtcagccgagatggcatcactgcactccagcctgggcaatagagcgagactccgtctgaaaacaaataaataaataaaaataaaatttaaattaaattaaaatttaaaaaaaataaaaaataaaatgaagtagggatattgttcccattttacagatgagaaaactgagctacagaaacacagagtgacttgcctggtacacagtaagttaccaccattcaaggacctaagttctggagagggtctgacttggagtggcaatttctagtgaggccctagagtcagaggagggaaggcaaatttgttcagaaggcagagaattcaaggaaaagggatttgagactcactgggaagatggaggcaagcagtgggtagaaaatggtgactttcccccatgttcctggttgtaaggacctgagaagaaaacagagtctggaagctctgtgttgaagggaatgaagtggtacaagtggctgctctgtccatgagctgagtgtgccacagggcccggtgtgcacatgtgcacacctcttcccggccaggttcgggggcccatgtttggctggtacaatctcaatggcttcttttcttttcttttcttctttttcttttctcttgcttgcttgcttgcttgcttgcttgcttgctttttgagacagaatctcgctctgttgcccaggctggagtgcagtgacgagatctcagctcactgcaactttgcttcctggattcaagtgattctcctgcctcagcctcctgagtagctaggttacgggtgcccagaaccacgcccggctaattttttgtatttttagtagagacggggtttcaccatgttggccaggctggtctcgaactcctgacctcgtgatccgcctgcctcggctcccaaagtgctgggattacaggtgtgagccaccgtgcctggcttacaatcgcttttttcctgccagagcctgaatttgtcacatgcccccagtgaagcatggctcagggcatctctaaccctgatgagaggcttgtttctggtgggaaataaaaccctcagtggcctcttcccagcctccacactgcattaaaaaatcaggccagcagcttctatgatcaatactctgccttgatctccaacagaaagaaaaacggcacttgctcacctcaacccaagaagtctaaggaagactcgggcaatccacaaatcttacactctagtccatcgatgaaaaggctgctatctctcgctgatgggcctggctgtttgcatctgggcagacccagccagccagagggctagccagcttggaaaggggcctggagacatgtgccttctctcctctgagttgcagcttctgcagagatctgcccgagctttcagcgtgtcatcgaaaccctcctcatggacacaccctccagttatgaggctgccatggaacttttcagccctgatcaagacatgagggaggcaggggctcagctgaagaagctggtggacaccctcccccaaaagcccagagaaagcatcattaagctcatggtaaccagcacctttcacgtcacactggttagaagtggcttccccggccgggcgcggtggctcacgcctgtaatcccagcactttgggaggccgaggcgggcggatcacgaggtcgggagatcgaggccatcccggctaaaacggtgaaaccccgtctctactaaaaatacaaaaaaattagccgggcgtagtggcgggcgcctgtagtcccagctacttgggcaggctgaggcaggagaatggcgtgaacccgggaggcggagcttgcagtgagccgagatcccgccactgcactccagcctgggcgacagagcgagactccgtctcaaaaaaaaaaaaaaaaaaaacagaagtggcttccccaagtggggctgcaggattgccccagttttcagacctgtttctaatccagagaggagagtcacagtgccactgtccccaggcaggcagcacagtgatctttctagacatctccttcttttttttttttttttttttgagacagagtctcgctctgtcgcccagactagggtgcaatagcacgatcttggcttactgcaacctccacctcccaggttcaagcgatctccggcctcagcctcttgagtagctgggattacaggcacccaccatcatgccgagctaatttctgtatttttgtagagatggggtttcaccgtgtttgccaggctggtctcgaactcctgacctcaggtgatccacccgcctcagcctcccaaagtgctggcattaaaggcgtgagccaccacgcccagcctccccttactattttgtaagaggcttttgagaaacaatccaagcccttactaccttagttcctcctagagttgactgcacctctcggttaatgttgaagtttctgtggctcgtcatctctgcctaactatgcaattcattcactgttgtattgggtttttctgtttctttgtctatttgttttaggaaaaaatagcccaaagctcactgtgtaattagcatttagaagctgaagatccccaactgctccagcctctgccgctgccatgctttgagtccacgcccaccagccttgctctcttcaataaaccacaagcatctc

SEQ ID NO: 517 - DNA, 5265 bp, Homo sapiens
ctcgcccctccgcgctcgcaacttcggcctcccccggctcccgcccgccctccctcctttgttgcgcgatgagggtcgggtttcggatctgaccgagccgccgccgcgggatggagccgctcagccaccggggcctgccgcgcctgtcctggatcgacaccctctacagcaacttcagctacgggacggacgagtacgacggagaggggaatgaggagcagaaggggcccccggagggctcagagaccatgccgtacatcgatgagtcgcccaccatgtccccgcagctcagcgcccgcagccagggccggggggatggcgtctccccgactccacctgagggactggctcctggggtggaagcagggaaaggcctggagatgaggaagctggttctctcggggttcttggccagcgaagagatctacattaaccagctggaagccctgttgctgcccatgaaacccctgaaggccaccgccaccacctcccagcccgtgctcaccatccagcagatcgagaccatcttctacaagatccaggacatctatgagatccacaaggagttctatgacaacctgtgccccaaggtgcaacagtgggacagccaggtcaccatgggccacctcttccagaagctggccagccagctcggtgtgtacaaagcgtttgtcgataactataaagtcgctctggagacagctgagaagtgcagccagtccaacaaccagttccagaagatctcagaggaactcaaagtgaaaggtcccaaggactccaaggacagccacacgtctgtcaccatggaagctctgctctacaagcccattgaccgggtcactcggagcaccctagtcctacacgacctgctgaagcacacacctgtggaccaccccgactacccgctgctgcaggatgccctccgcatctcccagaacttcctgtccagcatcaacgaggacatcgacccccgccggactgcagtgacaacgcccaagggggagacgcgacagctggtgaaggacggcttcctggtggaagtgtcagagagctcccggaagctgcggcacgtcttcctctttacagatgtcctactgtgtgccaagctgaagaagacctctgcagggaagcaccagcagtatgactgtaagtggtacatccccctggccgacctggtgtttccatcccccgaggaatctgaggccagcccccaggtgcaccccttcccagaccatgagctggaggacatgaagatgaagatctctgccctcaagagtgaaatccagaaggagaaagccaacaaaggccagagccgtgccatcgagcgcctgaagaagaagatgtttgagaatgagttcctgctgctgctcaactcccccacaatcccgttcaggatccacaatcggaatggaaagagttacctgttcctactgtcctcggactacgagaggtcagagtggagagaagcaattcagaaactacagaagaaggatctccaggcctttgtcctgagctcagtggagctccaggtgctcacaggatcctgtttcaagcttaggactgtacacaacattcctgtcaccagcaataaagacgacgatgagtctccaggactctatggcttccttcatgtcatcgtccactctgccaagggatttaagcaatcagccaacctgtactgtaccctggaggtggattccttcggctattttgtcagcaaagccaaaaccagggtgttccgggacacagcggagcccaagtgggatgaggagtttgagatcgagctggagggctcccagtccctgaggatcctgtgctatgagaagtgctatgacaagaccaaggtcaacaaggacaacaatgagatcgtggacaagatcatgggcaaaggacagatccagctggacccacaaaccgtggagaccaagaactggcacacggacgtgattgagatgaacgggatcaaagtggaattttccatgaaattcaccagccgagatatgagcctgaagaggaccccgtccaaaaagcagaccggcgtcttcggtgtgaagatcagcgtggtgacgaagcgggagcgctccaaggtgccctacatcgtccggcagtgtgtggaggaggtggagaagaggggtatcgaggaggttggcatctacaggatatcgggcgtggccacggacatccaggcgctcaaggccgtcttcgatgccaataacaaggacatcctgctgatgctgagtgacatggacatcaacgccatcgccgggacgctcaagctgtacttccgggaactgcccgagccgctcctcacggaccgactctacccagccttcatggagggcatcgccctgtcagaccctgctgccaaggaaaactgcatgatgcacctgctccgctccctgcccgaccccaacctcatcaccttcctcttcctgctggaacacttgaaaagggttgccgagaaggagcccatcaacaaaatgtcacttcacaacctggctaccgtgtttggacccacgttactgagaccctcagaagtggagagcaaagcacacctcacctcggctgcggacatctggtcccatgacgtcatggcgcaggtccaggtcctcctctactacctgcagcacccccccatttccttcgcagaactcaagcggaacacactgtacttctccaccgacgtgtagcccgaggcagggtggctgcgggcgggtggtggaaccagcccctccagcctggggtccaactcagacttgaaagactgcaatagaaaactcccaaacccagcactccagactcgagggaagccagcttccaagaactggaatgcgtacgtcttttgtgccaccttgtacaaagccggctgcccagccccagcctcaccaccgcatcccacctcctgccctccatacctctagttgtgtctgatgctccgtgctgttcgggaattgttttatgtacacttgtcaggcagaaaaggtagtgaccggcccggcgtgggcacacagacagcccgctttgttctttcatttcctccagcactttctttccgcctgagtccagcccaaggccttttattttgcgctgtgtaactgctgccagcttctctcttggccctgctcccagatggcggtctcctggcagcctcccctcagtcttcctccacccgcctcttccttcccagcctgcctgcatgcatgtgcacccttggtcttcgctccatcgccttgaaagctctgaagaggccctgggttgtcgcggcagcagtggtctgtttgatgctgccgtttgccgctgccggcccctcctcagactccgcctttgggagcacacctgctttgccttgctgcctgtgcaaatgttggacaagcagacacactcacactcgtccccagcttagcacagagctggagcgcccatttctggaattttccgtttgggaatctccacttctggggtttacctgttcggcctcctgcctatcagtgaggcatctctgactgttccttctactgcttttcagttcccttccctgctgttctatttcctttgagtgtaaagactcacaggtgacctgctatcgagatagccagagggtcaggagagaatgggggaggaggcggtcaggctgctgaggaaacaccacaggctgaacgggggaggaatgcacatgccacgctgggtgtcccgggtcgcggggaggcagctcagctcttaggagcaagttgtgggggcttttcaagaggggccaggcttcctggagggtgactgatgtggccgaagcaggtgtccaggcaggtaggctgcagccaggagctccctggcaccgcaggacctcgtggtactcttgccttagattttacacacactccacagccaagcactgccacggtcctccaggacctgggaagcaaaggcacaggcccacggtggccagccattgtggtgccgccccagcttctggatacagccttttgggtaaacactgggaactccagaagttgtggggagagtggggaatcagacagccgcctctaggggctgggttctgctggggcctccttgttggtgctgtaggcacccgccaggagcagggacccgacttgcagacgcattgcccggtactaggaaggagtgaggtgtgttcccaccgtacacttcccacacgagctgcggctgccagcctcgggccatcagcctaggagagcagatgcagctccaggggctcgacttatagccagttacagctccccggctcttctgtgtggcagagcgtcgtttccgggccctcagggctggggagctcagttcccattgcttgtgctcagggctgagtcttaaagaagggtttgccggccctaacgctgcagccgtgctgagaggccctttttgagcctgtttactcctgtggccttgggcagaacagtaaatactctgtgcacggaggaaagacatgcccaagaggaaggaagtactgaccatcggctgcctgtgagcagcttagcaaggagcccttgctccctgggaaaggcggtgaacttgagtctaaagatgcagtgcctggcccttcctaaggtccctgcctggcatccgagtgtcggtgtgtggcacagaaggctcctgcttgcttccaaagtgatggacaggaaggggcagagtgagtcacggcccagactgcgaccttcacgtctcagcctcagggagccccacagccccaagctcgctgaggcaacgtgagaacaggctatgggaaggctgcaaaggctgagaaatgcaaaggctcatatttataaatcccacccccagagtggggagggtcaggtgccagacctggactaaactgcaccaaggaaacacccagcagggtctcctgtgagccggggaccatgcagcccgaaacctccagtcactgcgcccggcaggagtcaggagccagggactgtgcagcctggaacctccagtcactgtgccagcagggtggctgtgcccagcaggagtcaggctaagaaacgccaggtctgcctgttcttgctgggcaatggctgatggctgccagtttctgctgatacacaggtaggatgggacccttcatgaatatctgactttaataagttggtaaggatatatttttttgtctatgttctgtttcaacttatgtagattattataaattgatgtaaaccacgtgagaggaaaatgttaataaaaaatgcaaagccccatcatttgcacaaaactcaaaaaaaaaaaaaaaaaaaaaaa

SEQ ID NO: 518 - DNA, 2790 bp, Homo sapiens
gcagagcgggacagccaggaggaagggcagcttggcagagcctcaggatggacccccttggggacacgctgcggcgactgcgggaggccttccacgcggggcgcacgcggccagctgagttccgggctgcgcagctccaaggcctgggccgcttcctgcaagaaaacaagcagcttctgcacgacgcactggcccaggacctgcacaagtcagccttcgagtcggaggtgtctgaggttgccatcagccagggcgaggtcaccctggccctcaggaacctccgggcctggatgaaggacgagcgtgtgcccaagaacctggccacgcagctggactccgccttcatccggaaggagccctttggcctggtcctcatcattgcgccctggaactatccgctgaacctgacgctggtgcccctcgtgggagccctcgctgcagggaactgtgtggtgctgaagccatcggagattagcaagaacgtcgagaagatcctggccgaggtgctgccccaatacgtggaccagagctgctttgctgtggtgctgggcgggccccaggagacggggcagctgctagagcacaggttcgactacatcttcttcacagggagccctcgtgtgggcaagattgttatgactgctgccgccaagcacctgacacctgtcaccctggagctggggggcaagaacccttgctacgtggacgacaactgcgacccccagaccgtggccaaccgcgtggcctggttccgctacttcaacgccggccagacctgcgtggcccccgactacgtcctatgcagccctgagatgcaggagaggctgctgcctgccctgcagagcaccatcacccgtttctatggcgacgacccccagagctccccaaacctgggccgcatcatcaaccagaaacagttccagcggctgcgggcattgctgggctgcggccgtgtggccattgggggccagagcgatgagagcgatcgctacatcgcccccacggtgctggtggatgtgcaggagatggagcctgtgatgcaggaggagatcttcgggcccatcctgcccatcgtgaacgtgcagagcttggacgaggccatcgagttcatcaaccggcgggagaagcccctggccctgtacgccttctccaacagcagccaggtggtcaagcgggtgctgacccagaccagcagcgggggcttctgtgggaacgacggcttcatgcacatgaccctggccagcctgccttttggaggagtgggtgccagtgggatgggccggtaccatggcaagttctccttcgacaccttctcccaccatcgcgcctgcctcctgcgcagcccggggatggagaagctcaacgccctccgctacccgccgcaatcgccgcgccgcctgaggatgctgctggtggccatggaggcccaaggctgcagctgcacactgctctgagcccttccccaggcccaggctgtagaccaccatgacagctgtcgcctgcggctggtggagacggggcctgggctcccgggcccgaggaggaaaaggattgccaaggctccagggcacccctcaaagcagcgcctgcctcctccctcctgggtcttccctctccctgcctcagcctcctccctcagccgctcccaaccatgagagccgaggtgggaggcatgggaaacagtgcagtgactcaccccctgcccccgcaccaaccacccatattcaggagaagaggacagacacggcacctctgagtcacccctctcctgtggagcgggcgtccgaggggcctggcgatctgactcaggccacaccatggaatcactgcatccaaggccattcctgccctctctgagtctcagtttttccatttgttcagtggagagaattaaccattgatacctcctggctgggtgaggcggctcacacctgtaatcccagcactttgggaggccgaggcaggcggatcacctgaaatcaggagttcaagatcagcctggctaacatggcgaaaccccgtctctactaaaaatacaaaaattagcctggcgtggtggcgcatgcctgtaatcccagctactcaggaggctaaggcaggagaatcgcttgaacccgggaggtggaggttgccgtgagctgagattgcgtcactgaactccggcctgggtgacagaaggaggctctgccttaaaaaaaaaaaaaaaaaaaaaaacctcctgggactgttgcaaggatgaaatgaaggattgagggattgagggattgctgagctggagctccaggtgtcctatctttctcagtggggtggcacggagcggggccgcctccctcttctctccaggcaggtggggctgtggttatgcgatagggtctcccttccctccagcccatgccaggagcttgtaactctttatcctcatggtgcccactacgagtcatactcttccccatgctgctcatcctcctgggccccatccactcagccaaagcagaatgcagggtttcctgcctgacaacccttctcacctcccaagtcccacttttgaacaagctgatgattctgaaactggcccaatttcctaaaagcgggggtgcttgagaaacctacatttggacaatgagaggctgctcctgcggcctgcgggccacctcctcttccttggctcctgctttctttttagactatatcaacctacaactttagtcgggaagagggacaggggtggacctgagtttcgtctcctgtctctctggctgatgtcacctgaataaagccttcttccctggc

SEQ ID NO: 519 - DNA, 2280 bp, Homo sapiens
ccgcccgccaccagctacgccccgtccgacgtgccctcgggggtcgcgctgttcctcaccatccctttcgccttcttcctgcccgagctgatatttgggttcttggtctggaccatggtagccgccacccacatagtataccccttgctgcaaggatgggtgatgtatgtctcgctcacctcgtttctcatctccttgatgttcctgttgtcttacttgtttggattttacaaaagatttgaatcctggagagttctggacagcctgtaccacgggaccactggcatcctgtacatgagcgctgccgtcctacaagtacatgccacgattgtttctgagaaactgctggacccaagaatttactacattaattcggcagcctcgttcttcgccttcatcgccacgctgctctacattctccatgccttcagcatctattaccactgatgcacaggcgccaggccaagggggaaatgctctttgaaagctccaattattggtccccaaaagcagcttccaacgtttgccatctggatgacaaacggaagatccactaaaacgtccacgggattaacagaacgtccttgcagactgagcgatgacaccacactttgtttggacatttaaattcactctgctgaataggaggaagcttttctttttcctgggaaaacaactgtctcttggaattatctgaccatgaacttgctcttctagacaactcacatcaaagccctcactccactaatggagaatcctagccccactaatgccaagtctgtttggggattttgcctcagctatgggcttccctagagtaggtctaggggaatactcagtctgatcttttttttgtttgttttattttgttttttttgagacggagtctcgctcttcctccaaggctggagtgcagtgacgcgatctccactcactgcaggctccgcctcccgggttcccgccattctcctgcctcagcctcccgagtagccgggactacaggcgcccaccaccatgcccggctaatttagttgtatttttagtagagatggggtttcaccgtattagccaggatggtctcgatctcctgacctcgtgatccgcccgcctcggcctcccaaagtgctgggattacaggcgtgagccaccgtgcccggcctgattctcttaaaattgaagaggtgctgccaaggccttcagatctaacgcagatgcatagaccttgttcctggtacttgttcagcctgtgctggggagccgtggtcccgagttccctgggaggctgacagggtcaagccaccctgcccaccaccctcccacttcccctcccctttcctctccagcattaggattcaagggaaatctgcatgaagccaattttgagggtagacgtgtggggaaaataaatcattatacagtaagacctggggcttgaggggtggggaatggggagggaagggcatagcctgctcctccatgagtctgacatctcggaaactgagcagctgccggacgcctgggtcaggaatccaagaccccacctcttaaggactggttcctcagaaagcaccctcagggaaaaaggtgaaaacattacatccgtggattctcctgccacaaccgcattggaagaaaaggctgccgcaacatctcagcgaggagtgaaggacccatgtcccaggaaccgcgctgcgccacctgcactcacccccctcacattctcttaagcacccggtggccctccgaggctggcggaatggtggtgcccacggggttgggcaagggctcaccaggacctcaacgggcaaagttgtgcacactaaaatatcaaatcaaggtgcttggttttaaagtaaatgtttttctaaagaaagctgtgttcttctgttgacccagacgaatagggcacagccctgtaactgcacgtgccttctgtcattgggaatgaaataaattattacgagaaagggacttgtcctaactggtttgaggccttacagttttgtatctacatttttcccctcctggggtttgcggggacagggacagaactacaggagtcatgggaaagaaaattctggcttcactactgctcactgctcactttctgatcactctgatactttttttttttttttttttttgcaacctgataccttgaaaagcttctatgtgtctctccttttgttgcctggcagctgtctaggatgatcactgattactatttactaagtagccacatgcaaataaaagttgtttggtaaaatggaaaaaaaaaaa

SEQ ID NO: 520 - DNA, 2387 bp, Homo sapiens
actctgccctgttgctgtcgcgccgctgctggttgctgtccctggacccctaccatggaggagaccatcaaagatccccccacatcagctgtcttgctggatcactgtcatttctctcaggtcatctttaacagtgtggagaagttctacatccctggaggggacgtcacatgtcattataccttcacccagcatttcatccctcgtcgaaaggattggattggcatctttagagtggggtggaagacaacccgtgagtattacaccttcatgtgggttactttgcccattgacctaaacaacaaatcagctaaacagcaggaagtccaattcaaagcttactacctgcccaaggatgatgagtattaccagttctgctatgtggatgaggatggtgtggtccggggagcaagtattcctttccaattccgtccagaaaatgaggaagacatcctggttgttaccactcagggagaggtggaagagattgagcagcacaacaaggagctttgcaaagaaaaccaggagctgaaggacagctgtatcagcctccagaagcagaactcagacatgcaggctgagctccaaaagaagcaggaggagctagaaaccctacagagcatcaataagaagttggaactgaaagtgaaagaacagaaggactattgggagacagagctgcttcaactgaaagaacaaaaccagaagatgtcctcagaaaatgagaagatgggaatcagagtggatcagcttcaggcccagctgtcaactcaagagaaagaaatggagaagcttgttcagggagatcaagataagacagagcagttagagcagctgaaaaaggaaaatgaccacctctttctcagtttaactgaacagaggaaggaccagaagaagctcgagcagacagtggagcaaatgaagcagaatgaaactactgcaatgaagaaacaacaggaattaatggatgaaaactttgacctgtcaaaaagactgagtgagaacgaaattatatgtaatgctctgcagagacagaaagagagattggaaggagaaaatgatcttttgaagagggagaacagcagattgctcagttacatgggtctggattttaattctttgccgtatcaagtacctacttcagatgaaggaggcgcaagacaaaatccaggacttgcctatggaaacccatattctggtatccaagaaagttcttcccccagcccgctctccatcaagaaatgccctatctgcaaagcagatgatatttgtgatcacaccttggagcaacagcagatgcagcccctttgtttcaattgtccaatttgtgacaagatcttcccagctacagagaagcagatctttgaagaccacgtgttctgccactctctctgagtatcccaacctcttggatgtatacagagattttatagaatagaacctatagcttctaccatgagttatatgagtcaagatcctgcctaacctgaaattattagggatttactcagccctgctgccgctaacagtggagttatgtcactgatctgaaggtcactgttaagggcttctgctgccatccttgtgggttgctacctttaagtcgcataactctagctgtatcatcctctcacctgtcattcttctgagggtctcagtacaagggccctgggatggagccaacctgggtattcacaacaggcctgacttgatactaagtgattagttttccaagttgtcccactgccattcaaagtcagcccttgagtgtatttgttctcagtcctaaccctggggccagagattggtccgaggttgagaattccttcctcctcatccttggtgttgctttctccaaatgattgttttagactagccaaaaatgccgtggcaaagagctcagaaatccaatttggataccaaaggtttctcatgttaatttctcagcccccaaagaagcatcttactcctgaaccttagacaggaagtattgtttcagtcacagaaagcttttctgggtacctctggttagcactttctactctctgatatttcctatgtacatagcttttattgttgtaaatcctttcttaatggttaaataggattgttagcaactatgggtttgcagttttctgagtaggtgagttttgaatatgggtaaatcagaataatgagacaacttgttaatctctttaatactaaaaataaattactcttctatttcagggacttaggtaatttaaaataaaccttcaatttatggtcttctgttttgaagctcatgggaaaattgtgatcaaaagggctatgggaagggcagaccccgccaatgatttctcttcacctgtcttaagattaaataaaaaagagtgtcctggcagtta

SEQ ID NO: 521 - DNA, 4040 bp, Homo sapiens
gtccttcccacccttagtcccaggcatctgactaccgggaacctcagccagagtccgggagccccccaccccgtccaggagccaacagagcccccgtcttgctggcgtgagaatacattgctctcctttggttgaatcagctgtccctcttcgtgggaaaatgaaccagaagacaatcctcgtgctcctcattctggccgtcatcaccatctttgccttggtttgtgtcctgctggtgggcaggggtggagatgggggtgaacccagccagcttccccattgcccctctgtatctcccagtgcccagccttggacacaccctggccagagccagctgtttgcagacctgagccgagaggagctgacggctgtgatgcgctttctgacccagcggctggggccagggctggtggatgcagcccaggcccggccctcggacaactgtgtcttctcagtggagttgcagctgcctcccaaggctgcagccctggctcacttggacagggggagccccccacctgcccgggaggcactggccatcgtcttctttggcaggcaaccccagcccaacgtgagtgagctggtggtggggccactgcctcacccctcctacatgcgggacgtgactgtggagcgtcatggaggccccctgccctatcaccgacgccccgtgctgttccaagagtacctggacatagaccagatgatcttcaacagagagctgccccaggcttctgggcttctccaccactgttgcttctacaagcaccggggacggaacctggtgacaatgaccacggctccccgtggtctgcaatcaggggaccgggccacctggtttggcctctactacaacatctcgggcgctgggttcttcctgcaccacgtgggcttggagctgctagtgaaccacaaggcccttgaccctgcccgctggactatccagaaggtgttctatcaaggccgctactacgacagcctggcccagctggaggcccagtttgaggccggcctggtgaatgtggtgctgatcccagacaatggcacaggtgggtcctggtccctgaagtcccctgtgcccccgggtccagctccccctctacagttctatccccaaggcccccgcttcagtgtccagggaagtcgagtggcctcctcactgtggactttctcctttggcctcggagcattcagtggcccaaggatctttgacgttcgcttccaaggagaaagactagtttatgagataagcctccaagaggccttggccatctatggtggaaattccccagcagcaatgacgacccgctatgtggatggaggctttggcatgggcaagtacaccacgcccctgacccgtggggtggactgcccctacttggccacctacgtggactggcacttccttttggagtcccaggcccccaagacaatacgtgatgccttttgtgtgtttgaacagaaccagggcctccccctgcggcgacaccactcagatctctactcgcactactttgggggtcttgcggaaacggtgctggtcgtcagatctatgtccaccttgctcaactatgactatgtgtgggatacggtcttccaccccagtggggccatagaaatacgattctatgccacgggctacatcagctcggcattcctctttggtgctactgggaagtacgggaaccaagtgtcagagcacaccctgggcacggtccacacccacagcgcccacttcaaggtggatctggatgtagcaggactggagaactgggtctgggccgaggatatggtctttgtccccatggctgtgccctggagccctgagcaccagctgcagaggctgcaggtgacccggaagctgctggagatggaggagcaggccgccttcctcgtgggaagcgccacccctcgctacctgtacctggccagcaaccacagcaacaagtggggtcacccccggggctaccgcatccagatgctcagctttgctggagagccgctgccccaaaacagctccatggcgagaggcttcagctgggagaggtaccagctggctgtgacccagcggaaggaggaggagcccagtagcagcagcgttttcaatcagaatgacccttgggcccccactgtggatttcagtgacttcatcaacaatgagaccattgctggaaaggatttggtggcctgggtgacagctggttttctgcatatcccacatgcagaggacattcctaacacagtgactgtggggaacggcgtgggcttcttcctccgaccctataacttctttgacgaagacccctccttctactctgccgactccatctacttccgaggggaccaggatgctggggcctgcgaggtcaaccccctagcttgcctgccccaggctgctgcctgtgcccccgacctccctgccttctcccacgggggcttctctcacaactaggcggtcctgggatggggcatgtggccaagggctccagggccagggtgtgagggatggggagcagctgggcactgggccggcagcctggttccctctttcctgtgccaggactctctttcttccactaccctccctcgcatccgcctctgagccaggagcctcctgaccctgtgatgcctgacacaggggacactgaaccttgttgatgccagctgtactgagttctcatccacagaggccaggcatggcccagcctggagccgtggccgagggcttccctagatggttccctttgttgctgtctggctttcccgaatctttttaggccacctccaaggactctaaaagggggctattccctggagaccccagagtagggttgccagtcctgcaagtccatagctgagctggaaaggatgcttctgctcacattccctctcatccaggtcctttccttctcgtcttcctctctctcacctacttcctcctcctcctcctgttcctgccttctcttctatcctgcaatttctcccgaatcctgaggggatatccctatgtcccagcccctggtactcccccagccctcagttttcagtcaagttccgtctcctctccagccctatggaagtctcaaggtcacgggacccctaatcagagtggccaatccctgtgtgtcgttcccttgtgtctgttgcttattgggagtaggagttgctcctacccctgtcctggggctgggtgtgtttcaggacagctgcttctgtgcatttgtgtctgcctgcctcatgctctctatagaggaggatggtcatcgtgacagcagcagctcaagttagcatttcaagtgatttgggggtgcaatgataatgaagaatggccattttgtaccagggctctgtattctgcaacagcctgtttgggaggctggagtggaaacaaagggtgggcatcaaagatgagaagccaaagcccctacaactccagccacccagccaggaggggctgtccaatcacattcaggcatgcgaatgagctgggccctgggtgaggtgggggtctggcctagtggggaggggcctggcctgggtggggcagggcctggcctggtccaggcttgggctccattcccatcactgctgtccctcctgaggtctggattggggatggggacaaagaaatagcaagagatgagaaacaacagaaacttttttctctaaaggactggttaaatcaattctgatacagccttacaatacaatagtatgcagctaaaaaataattgtatgtctttatatactaatatgtaataatcttcaggtgaaaaaggcaagccacagaaatgtgtwtagcgcacttcccatttgtgtttcagaaaggagtagaatataaacacataattgcttatgtatgcctattcagaataaatgggtaacactgattacttttgggaggggaaccagtaggttgaggacaggagagggaagggtcttaacacttacacccttttgtacattttgaattttgaaccatgtgactgtattacctattcaaaataaacaataaatgggcccaaaaaaaaaaaaaaaaa

SEQ ID NO: 522 - DNA, 5926 bp, Homo sapiens
ccggctgcctctgctgcagttcagagcaacttcaggagcttcccagccgagagcttcaggacgcctttcctgtcccactggcccagttgccacaacaaacaacagagaagacggtgaccatgggggatgtgaagctggttgcctcgtcacacatttccaaaacctccctcagtgtggatccctcaagagttgactccatgcccctgacagaggcccctgctttcattttgccccctcggaacctctgcatcaaagaaggagccaccgccaagttcgaagggcgggtccggggttacccagagccccaggtgacatggcacagaaacgggcaacccatcaccagcgggggccgcttcctgctggattgcggcatccgggggactttcagccttgtgattcatgctgtccatgaggaggacaggggaaagtatacctgtgaagccaccaatggcagtggtgctcgccaggtgacagtggagttgacagtagaaggaagttttgcgaagcagcttggtcagcctgttgtttccaaaaccttaggggatagattttcagcttcagcagtggagacccgtcctagcatctggggggagtgcccaccaaagtttgctaccaagctgggccgagttgtggtcaaagaaggacagatgggacgattctcctgcaagatcactggccggccccaaccgcaggtcacctggctcaagggaaatgttccactgcagccgagtgcccgtgtgtctgtgtctgagaagaacggcatgcaggttctggaaatccatggagtcaaccaagatgacgtgggagtgtacacgtgcctggtggtgaacgggtcggggaaggcctcgatgtcagctgaactttccatccaaggtttggacagtgccaataggtcatttgtgagagaaacaaaagccaccaattcagatgtcaggaaagaggtgaccaatgtaatctcaaaggagtcgaagctggacagtctggaggctgcagccaaaagcaagaactgctccagcccccagagaggtggctccccaccctgggctgcaaacagccagcctcagcccccaagggagtccaagctggagtcatgcaaggactcgcccagaacggccccgcagaccccggtccttcagaagacttccagctccatcaccctgcaggccgcaagagttcagccggaaccaagagcaccaggcctgggggtcctatcaccttctggagaagagaggaagaggccagctcctccccgtccagccaccttccccaccaggcagcctggcctggggagccaagatgttgtgagcaaggctgctaacaggagaatccccatggagggccagagggattcagcattccccaaatttgagagcaagccccaaagccaggaggtcaaggaaaatcaaactgtcaagttcagatgtgaagtttccgggattccaaagcctgaagtggcctggttcctggaaggcacccccgtgaggagacaggaaggcagcattgaggtttatgaagatgctggctcccattacctctgcctgctgaaagcccggaccagggacagtgggacatacagctgcactgcttccaacgcccaaggccaggtgtcctgtagctggaccctccaagtggaaaggcttgccgtgatggaggtggccccctccttctccagtgtcctgaaggactgcgctgttattgagggccaggattttgtgctgcagtgctccgtacgggggaccccagtgccccggatcacttggctgctgaatgggcagcccatccagtacgctcgctccacctgcgaggccggcgtggctgagctccacatccaggatgccctgccggaggaccatggcacctacacctgcctagctgagaatgccttggggcaggtgtcctgcagcgcctgggtcaccgtccatgaaaagaagagtagcaggaagagtgagtaccttctgcctgtggctcccagcaagcccactgcacccatcttcctgcagggcctctctgatctcaaagtcatggatggaagccaggtcactatgactgtccaagtgtcagggaatccaccccctgaagtcatctggctgcacaatgggaatgagatccaagagtcagaggacttccactttgaacagagaggaactcagcacagcctttggatccaggaagtgttcccggaggacacgggcacgtacacctgcgaggcctggaacagcgctggagaggtccgcacccaggccgtgctcacggtacaagagcctcacgatggcacccagccctggttcatcagtaagcctcgctcagtgacagcctccctgggccagagtgtcctcatctcctgcgccatagctggtgacccctttcctaccgtgcactggctcagagatggcaaagccctctgcaaagacactggccacttcgaggtgcttcagaatgaggacgtgttcaccctggttctaaagaaggtgcagccctggcatgccggccagtatgagatcctgctcaagaaccgggttggcgaatgcagttgccaggtgtcactgatgctacagaacagctctgccagagcccttccacgggggagggagcctgccagctgcgaggacctctgtggtggaggagttggtgctgatggtggtggtagtgaccgctatgggtccctgaggcctggctggccagcaagagggcagggttggctagaggaggaagacggcgaggacgtgcgaggggtgctgaagaggcgcgtggagacgaggcagcacactgaggaggcgatccgccagcaggaggtggagcagctggacttccgagacctcctggggaagaaggtgagtacaaagaccctatcggaagacgacctgaaggagatcccggccgagcagatggatttccgtgccaacctgcagcggcaagtgaagccaaagactgtgtctgaggaagagaggaaggtgcacagcccccagcaggtcgattttcgctctgtcctggccaagaaggggacttccaagacccccgtgcctgagaaggtgccaccgccaaaacctgccaccccggattttcgctcagtgctgggtggcaagaagaaattaccagcagagaatggcagcagcagtgccgagaccctgaatgccaaggcagtggagagttccaagcccctgagcaatgcacagccttcagggcccttgaaacccgtgggcaacgccaagcctgctgagaccctgaagccaatgggcaacgccaagcctgccgagaccctgaagcccatgggcaatgccaagcctgatgagaacctgaaatccgctagcaaagaagaactcaagaaagacgttaagaatgatgtgaactgcaagagaggccatgcagggaccacagataatgaaaagagatcagagagccaggggacagccccagccttcaagcagaagctgcaagatgttcatgtggcagagggcaagaagctgctgctccagtgccaggtgtcttctgaccccccagccaccatcatctggacgctgaatggaaagaccctcaagaccaccaagttcatcatcctctcccaggaaggctcactctgctccgtctccatcgagaaggcactgcctgaggacagaggcttatacaagtgtgtagccaagaatgacgctggccaggcggagtgctcctgccaagtcaccgtggatgatgctccagccagtgagaacaccaaggccccagagatgaaatcccggaggcccaagagctctcttcctcccgtgctaggaactgagagtgatgcgactgtgaaaaagaaacctgcccccaagacacctccgaaggcagcaatgccccctcagatcatccagttccctgaggaccagaaggtacgcgcaggagagtcagtggagctgtttggcaaagtgacaggcactcagcccatcacctgtacctggatgaagttccgaaagcagatccaggaaagcgagcacatgaaggtggagaacagcgagaatggcagcaagctcaccatcctggccgcgcgccaggagcactgcggctgctacacactgctggtggagaacaagctgggcagcaggcaggcccaggtcaacctcactgtcgtggataagccagaccccccagctggcacaccttgtgcctctgacattcggagctcctcactgaccctgtcctggtatggctcctcatatgatgggggcagtgctgtacagtcctacagcatcgagatctgggactcagccaacaagacgtggaaggaactagccacatgccgcagcacctctttcaacgtccaggacctgctgcctgaccacgaatataagttccgtgtacgtgcaatcaacgtgtatggaaccagtgagccaagccaggagtctgaactcacaacggtaggagagaaacctgaagagccgaaggatgaagtggaggtgtcagatgatgatgagaaggagcccgaggttgattaccggacagtgacaatcaatactgaacaaaaagtatctgacttctacgacattgaggagagattaggatctgggaaatttggacaggtctttcgacttgtagaaaagaaaactcgaaaagtctgggcagggaagttcttcaaggcatattcagcaaaagagaaagagaatatccggcaggagattagcatcatgaactgcctccaccaccctaagctggtccagtgtgtggatgcctttgaagaaaaggccaacatcgtcatggtcctggagatcgtgtcaggaggggagctgtttgagcgcatcattgacgaggactttgagctgacggagcgtgagtgcatcaagtacatgcggcagatctcggagggagtggagtacatccacaagcagggcatcgtgcacctggacctcaagccggagaacatcatgtgtgtcaacaagacgggcaccaggatcaagctcatcgactttggtctggccaggaggctggagaatgcggggtctctgaaggtcctctttggcaccccagaatttgtggctcctgaagtgatcaactatgagcccatcggctacgccacagacatgtggagcatcggggtcatctgctacatcctagtcagtggcctttcccccttcatgggagacaacgataacgaaaccttggccaacgttacctcagccacctgggacttcgacgacgaggcattcgatgagatctccgacgatgccaaggatttcatcagcaatctgctgaagaaagatatgaaaaaccgcctggactgcacgcagtgccttcagcatccatggctaatgaaagataccaagaacatggaggccaagaaactctccaaggaccggatgaagaagtacatggcaagaaggaaatggcagaaaacgggcaatgctgtgagagccattggaagactgtcctctatggcaatgatctcagggctcagtggcaggaaatcctcaacagggtcaccaaccagcccgctcaatgcagaaaaactagaatctgaagaagatgtgtcccaagctttccttgaggctgttgctgaggaaaagcctcatgtaaaaccctatttctctaagaccattcgcgatttagaagttgtggagggaagtgctgctagatttgactgcaagattgaaggatacccagaccccgaggttgtctggttcaaagatgaccagtcaatcagggagtcccgccacttccagatagactacgatgaggacgggaactgctctttaattattagtgatgtttgcggggatgacgatgccaagtacacctgcaaggctgtcaacagtcttggagaagccacctgcacagcagagctcattgtggaaacgatggaggaaggtgaaggggaaggggaagaggaagaagagtgaaacaaagccagagaaaagcagtttctaagtcatattaaaaggactatttctctcaaaatcca

SEQ ID NO: 523 - DNA, 4040 bp, Homo sapiens
gtcgcctctcacccgccccggccgctccagcccgaggcgccccgaccccgcgccactccgcgcccggccagccgcccgcagccatggggctcctgcccaagctcggcgtgtcccagggcagcgacacctctactagccgagccggccgctgtgcccgctcggtcttcggcaacattaaggtgtttgtgctctgccaaggcctcctgcagctctgccaactcctgtacagcgcctacttcaagagcagcctcaccaccattgagaagcgctttgggctctccagttcttcatcgggtctcatttccagcttgaatgagatcagcaatgccatcctcatcatctttgtcagctactttggcagccgggtgcaccgtccacgtctgattggcatcggaggtctcttcctggctgcaggtgccttcatcctcaccctcccacacttcctctccgagccctaccagtacaccttggccagcactgggaacaacagccgcttgcaggccgagctctgccagaagcattggcaggacctgcctcccagtaagtgccacagcaccacccagaacccccagaaggagaccagcagcatgtggggcctgatggtggttgcccagctgctggctggcatcgggacagtgcctattcagccatttgggatctcctatgtggatgacttctcagagcccagcaactcgcccctgtacatctccatcttatttgccatctctgtatttggaccggctttcgggtacctgctgggctctatcatgctgcagatctttgtggactatggcagggtcaacacagctgcagttaacttggtcccgggtgacccccgatggattggagcctggtggctaggcctgctcatttcttcagctttattggttctcacctctttccccttttttttcttccctcgagcaatgcccataggagcaaagagggctcctgccacagcagatgaagcaaggaagttggaggaggccaagtcaagaggctccctggtggatttcattaaacggtttccatgcatctttctgaggctcctgatgaactcactcttcgtcctggtggtcctggcccagtgcaccttctcctccgtcattgctggcctctccaccttcctcaacaagttcctggagaagcagtatggcacctcagcagcctatgccaacttcctcattggtgctgtgaacctccctgctgcagccttggggatgctgtttggaggaatcctcatgaagcgctttgttttctctctacaaaccattccccgcatagctaccaccatcatcaccatctccatgatcctttgtgttcctttgttcttcatgggatgctccaccccaactgtggccgaagtctacccccctagcacatcaagttctatacatccgcagtctcctgcctgccgcagggactgctcgtgcccagattctatcttccacccggtctgtggagacaatggaatcgagtacctctccccttgccatgccggctgcagcaacatcaacatgagctctgcaacctccaagcaactgatctatttgaactgcagctgtgtgaccgggggatccgcttcagcaaagacaggatcgtgccctgtcccctgtgcccacttcctgctcccggccatcttcctcatctccttcgtgtccctgatagcctgcatctcccacaaccccctctacatgatggttctgcgtgtggtgaaccaggaggaaaagtcatttgccatcggggtgcagttcttgttgatgcgcttgctggcctggctgccatctccagccctctatggcctcaccattgaccactcctgcatccggtggaactcgctgtgcttggggaggcgaggggcctgcgcctactatgacaacgatgctctccgagacaggtacctgggcctgcagatgggctacaaggcgctgggcatgctgctgctttgcttcatcagctggagggtgaagaagaacaaggagtacaacgtgcagaaggcggcaggcctcatctgaccccaccctgggccactgcctgctccagagagtggaccttgactcttccacacctgcctatactcactaatgttaacacgtcatttcctttttgtatttttaaacaagaaagaaaaccccagtcctcatttgccttccctacctcttcctcccagagtcctccccacagttcctaagggccactgtgtacccgggctgtgtgggccagaactggggggctgagtcttccctggccccttggaagaggcccccagatgcccaggctcacttcagtgttgagtcctccattgaggatgcccactgaggcagccaggcccctcaccagccctggggggaatcctaaacagagagagaaaaagggtatctgcccttcttgccaggcagctccactctcccgctgactgcccacaccctgcagagtggcaggggtgaaaggaagaaggaagtggctgagttattaatagccagagccactgggagactggggagactggctgtaacccccttcacacctgggtttggcatcagcacagactacgggaggggctggctccctccccctcagaccctcacttcctgtacctagaggccattctggatgctgccatgttgggaagtacagtctctgcccattacctgcatgcaggcaccagagcagggactgagaaaccccaaggatgggtcatctaagtgctgtccatatgaaccctggactttctgtccttagatcctcacatgttatccctgtctttctggggtacgtttcaaactgaggaagctacaacacagtgaagacccaaggaaggcctatgaaatggtcctgatgcccaacctcccaccccttcaatgtggggacgagaccccctcatctcagagtaatgggaagaacctcccacatctccctggcagcagatgaggtggcttcacatgcacttccctgtctggacttcagcccgtattccgaggagtagagaggcagaagagatgtcagcaaagcaagtgatgaagcagagtggatgtccactgtcaccaagctggatggcaagctgcggcccacaaaacagccagtcaggttggctttcctggtttcagacatgctcataccattcccattttctcagcctcttctctgcctccagagaggtggatgcctgggttgagagacacagctgctacgtgatagatgttgagagacagaagccaacgaaggaggtcattcatcaacaaatatatttattggagaccgactttgtgcaaagcaatgctaatcagggttctccatggagcttccctcagctcttacctcacctccctccatttacattagggccttctcccagggtgtgctcggtgggcagtgtgggactgggggtgtgggagttggtgagagcaggaggagaggtggggacagcaagaagccacagattggcatgaaggatcctgacctgactatccatgccatccatggcccccagactgactctgcacctggccctttgccagacagctctgtctccccatgtcctctggaacagctgggcatgggtcatggccattcatgacccttaagtgccacccttcttggaagaccccctccagaagcatactggaagccacctctggaaaagcctcatatggtgatatgccaaaatatttatgtcaatgtccaaacaaagtccaatgccatgagactgaagtctttgtggaaaccactgttacagacaagcttatttccaaagccacctcatttccaaacatctcactcaggaagggaggctcaatgtaacctcaggggccagttttagcatttgaaatggttctgcttggaaaatgatgccctgcaactaaccctggtctttcccatggcaatttaaccacatttggaaggcactgccttcagctgagtttatgaacaatgaatgccaaccttcaggttctagaagattggttgcactcccaaacctttattctattatattactattaaaatattctaattttgctattgaggtaaaaaaaaaaaaa

SEQ ID NO: 524 - DNA, 2907 bp, Homo sapiens
gccatctgggcccaggccccatgccccgaggaggggtggtctgaagcccaccagagccccctgccagactgtctgcctcccttctgactgtggccgcttggcatggccagcaacagcagctcctgcccgacacctgggggcgggcacctcaatgggtacccggtgcctccctacgccttcttcttcccccctatgctgggtggactctccccgccaggcgctctgaccactctccagcaccagcttccagttagtggatatagcacaccatccccagccaccattgagacccagagcagcagttctgaagagatagtgcccagccctccctcgccaccccctctaccccgcatctacaagccttgctttgtctgtcaggacaagtcctcaggctaccactatggggtcagcgcctgtgagggctgcaagggcttcttccgccgcagcatccagaagaacatggtgtacacgtgtcaccgggacaagaactgcatcatcaacaaggtgacccggaaccgctgccagtactgccgactgcagaagtgctttgaagtgggcatgtccaaggagtctgtgagaaacgaccgaaacaagaagaagaaggaggtgcccaagcccgagtgctctgagagctacacgctgacgccggaggtgggggagctcattgagaaggtgcgcaaagcgcaccaggaaaccttccctgccctctgccagctgggcaaatacactacgaacaacagctcagaacaacgtgtctctctggacattgacctctgggacaagttcagtgaactctccaccaagtgcatcattaagactgtggagttcgccaagcagctgcccggcttcaccaccctcaccatcgccgaccagatcaccctcctcaaggctgcctgcctggacatcctgatcctgcggatctgcacgcggtacacgcccgagcaggacaccatgaccttctcggacgggctgaccctgaaccggacccagatgcacaacgctggcttcggccccctcaccgacctggtctttgccttcgccaaccagctgctgcccctggagatggatgatgcggagacggggctgctcagcgccatctgcctcatctgcggagaccgccaggacctggagcagccggaccgggtggacatgctgcaggagccgctgctggaggcgctaaaggtctacgtgcggaagcggaggcccagccgcccccacatgttccccaagatgctaatgaagattactgacctgcgaagcatcagcgccaagggggctgagcgggtgatcacgctgaagatggagatcccgggctccatgccgcctctcatccaggaaatgttggagaactcagagggcctggacactctgagcggacagccggggggtggggggcgggacgggggtggcctggcccccccgccaggcagctgtagccccagcctcagccccagctccaacagaagcagcccggccacccactccccgtgaccgcccacgccacatggacacagccctcgccctccgccccggcttttctctgcctttctaccgaccatgtgaccccgcaccagccctgcccccacctgccctcccgggcagtactggggaccttccctgggggacggggagggaggaggcagcgactccttggacagaggcctgggccctcagtggactgcctgctcccacagcctgggctgacgtcagaggccgaggccaggaactgagtgaggcccctggtcctgggtctcaggatgggtcctgggggcctcgtgttcatcaagacacccctctgcccagctcaccacatcttcatcaccagcaaacgccaggacttggctcccccatcctcagaactcacaagccattgctccccagctggggaacctcaacctcccccctgcctcggttggtgacagagggggtgggacaggggcggggggttccccctgtacataccctgccataccaaccccaggtattaattctcgctggttttgtttttattttaatttttttgttttgatttttttaataagaattttcattttaagcacatttatactgaaggaatttgtgctgtgtattggggggagctggatccagagctggagggggtgggtccgggggagggagtggctcggaaggggcccccactctcctttcatgtccctgtgccccccagttctcctcctcagccttttcctcctcagttttctctttaaaactgtgaagtactaactttccaaggcctgccttcccctccctcccactggagaagccgccagcccctttctccctctgcctgaccactgggtgtggacggtgtggggcagccctgaaaggacaggctcctggccttggcacttgcctgcacccaccatgaggcatggagcagggcagagcaagggccccgggacagagttttcccagacctggctcctcggcagagctgcctcccgtcagggcccacatcatctaggctccccagcccccactgtgaaggggctggccaggggcccgagctgcccccacccccggcctcagccaccagcacccccatagggcccccagacaccacacacatgcgcgtgcgcacacacacaaacacacacacactggacagtagatgggccgacacacacttggcccgagttcctccatttccctggcctgccccccacccccaacctgtcccacccccgtgccccctccttaccccgcaggacgggcctacaggggggtctcccctcacccctgcacccccagctgggggagctggctctgccccgacctccttcaccaggggttggggccccttcccctggagcccgtgggtgcacctgttactgttgggctttccactgagatctactggataaagaataaagttctatttattct

SEQ ID NO: 525 - DNA, 695 bp, Homo sapiens
tagttaaaatctcccaaattcatattacaggaggatcccttttcccccagaaattactcaatgctgaaacctctcaaagtggtattagagacgctgaaagcaccatggacgggttttatgatcagcaagtcccttttatggtcccaggggtaagtttatgtggcttttggtttgttttgtcctccctctccaatatgagtcttccccctgtggacctctttactacacttgagccttcactttctgttggcctctttcagaaatctcgatctgaggaatgcagagggcggcctgtgattgacagaaagaggaagtttttggacacagatctggctcacgattctgaaggtagtaaagctttccctgattatgttgtggcttccctgctcccagtgacagtagcgtgtagattcttccctgtcttctccctagcgaaagaaatatcctcattctggggtcttctttttcaatttcagagctatttcaggatctcagtcaacttcaagaggcttggttagctgaaggcaagtttcatggatgtcctattttccatataaaacattttactgtgctttttaataaaacttaaaggtctaaaataaaaatctattttccagcacaagttcctgatgatgaacagtttgtcccagattttcagtctgataaccgtaagtacctttctggtgatggcacat

SEQ ID NO: 526 - DNA, 1713 bp, Homo sapiens
ccaagggagaaaactattctgtcaaagagacggtgccaaaaggcaaaaacaaaggagctgatggcaaagaaggtagctgtgattggagctggggtcagtggcctaatttctctgaagtgctgtgtggatgagggacttgagcccacttgctttgagagaactgaagatattggaggagtgtggaggttcaaagagaatgtggaagatggccgagcaagtatctatcaatctgtcgttaccaacaccagcaaagaaatgtcctgtttcagtgactttccaatgcctgaagattttccaaacttcctgcataattctaaacttctggaatatttcaggatttttgctaaaaaatttgatctgctaaaatatattcagttccagacaactgtccttagtgtgagaaaatgtccagatttctcatcctctggccaatggaaggttgtcactcagagcaacggcaaggagcagagtgctgtctttgacgcagttatggtttgcagtggccaccacattctacctcatatcccactgaagtcatttccaggtatggagaggttcaaaggccaatatttccatagccgccaatacaagcatccagatggatttgagggaaaacgcatcctggtgattggaatgggaaactcaggctcagatattgctgttgagctgagtaagaatgctgctcaggtttttatcagcaccaggcatggcacctgggtcatgagccgtatctctgaagatggctatccttgggactcagtgttccacacccggtttcgttctatgctccgcaatgtactgccacgaacagctgtaaaatggatgatagaacaacagatgaatcggtggttcaaccatgaaaattatggccttgagcctcaaaacaaatacattatgaaggaacctgtactaaatgatgatgtcccaagtcgtctactctgtggagccatcaaggtgaaatctacagtgaaagagctcacagaaacttctgccatctttgaggatggaacagtggaggagaacattgatgtcatcatttttgcaacaggatatagtttctcttttcccttccttgaagattcactcgttaaagtagagaataatatggtctcactgtataaatacatattccccgctcacctggacaagtcaaccctcgcgtgcattggtctcatccagcccctaggttccattttcccaactgctgaacttcaagctcgttgggtgacaagagttttcaaaggcttgtgtagcctgccctcagagagaactatgatgatggacattatcaaaaggaatgaaaaaagaattgacctgtttggagaaagccagagccagacgttgcagaccaattatgttgactacttggacgagctcgccttagagataggtgcgaagccagatttctgctctctcttgttcaaagatcctaaactggctgtgagactctatttcggaccctgcaactcctattagtatcgcctggttgggcctgggcaatgggaaggagccagaaatgccatcttcacccagaaacaaagaatactgaagccactcaagactcgggccctgaaggattcatctaatttctcagtttcttttctgttgaaaatcctgggccttcttgctgttgttgtggcctttttttgccaacttcaatggtcctagtcagcataatgctttgggctttattatcttgtcagtcactacctc

SEQ ID NO: 527 - DNA, 2146 bp, Homo sapiens
cccaagatggaagggagcggcggccgcgtccgcctcaaggcgcattacgggggggacatcttcatcaccagcgtggacgccgccacgaccttcgaggagctctgtgaggaagtgagagacatgtgtcgtctgcaccagcagcacccgctcaccctcaagtgggtggacagcgaaggtgacccttgcacggtgtcctcccagatggagctggaagaggctttccgcctggcccgtcagtgcagggatgaaggcctcatcattcatgttttcccgagcacccctgagcagcctggcctgccatgtccgggagaagacaaatctatctaccgccggggagccagaagatggaggaagctgtaccgtgccaacggccacctcttccaagccaagcgctttaacaggagagcgtactgcggtcagtgcagcgagaggatatggggcctcgcgaggcaaggctacaggtgcatcaactgcaaactgctggtccataagcgctgccacggcctcgtcccgctgacctgcaggaagcatatggattctgtcatgccttcccaagagcctccagtagacgacaagaacgaggacgccgaccttccttccgaggagacagatggaattgcttacatttcctcatcccggaagcatgacagcattaaagacgactcggaggaccttaagccagttatcgatgggatggatggaatcaaaatctctcaggggcttgggctgcaggactttgacctaatcagagtcatcgggcgcgggagctacgccaaggttctcctggtgcggttgaagaagaatgaccaaatttacgccatgaaagtggtgaagaaagagctggtgcatgatgacgaggatattgactgggtacagacagagaagcacgtgtttgagcaggcatccagcaaccccttcctggtcggattacactcctgcttccagacgacaagtcggttgttcctggtcattgagtacgtcaacggcggggacctgatgttccacatgcagaggcagaggaagctccctgaggagcacgccaggttctacgcggccgagatctgcatcgccctcaacttcctgcacgagagggggatcatctacagggacctgaagctggacaacgtcctcctggatgcggacgggcacatcaagctcacagactacggcatgtgcaaggaaggcctgggccctggtgacacaacgagcactttctgcggaaccccgaattacatcgcccccgaaatcctgcggggagaggagtacgggttcagcgtggactggtgggcgctgggagtcctcatgtttgagatgatggccgggcgctccccgttcgacatcatcaccgacaacccggacatgaacacagaggactaccttttccaagtgatcctggagaagcccatccggatcccccggttcctgtccgtcaaagcctcccatgttttaaaaggatttttaaataaggaccccaaagagaggctcggctgccggccacagactggattttctgacatcaagtcccacgcgttcttccgcagcatagactgggacttgctggagaagaagcaggcgctccctccattccagccacagatcacagacgactacggtctggacaactttgacacacagttcaccagcgagcccgtgcagctgaccccagacgatgaggatgccataaagaggatcgaccagtcagagttcgaaggctttgagtatatcaacccattattgctgtccaccgaggagtcggtgtgaggccgcgtgcgtctctgtcgtggacacgcgtgattgaccctttaactgtatccttaaccaccgcatatgcatgccaggctgggcacggctccgagggcggccagggacagacgcttgcgccgagaccgcagagggaagcgtcagcgggcgctgctgggagcagaacagtccctcacacctggcccggcaggcagcttcgtgctggaggaacttgctgctgtgcctgcgtcgcggcggatccgcggggaccctgccgagggggctgtcatgcggtttccaaggtgcacattttccacggaaacagaactcgatgcactgacctgctccgccaggaaagtgagcgtgtagcgtcctgaggaataaaatgttccgatgaaaaaaaaaa

SEQ ID NO: 528 - DNA, 4163 bp, Homo sapiens
ttgatttggtatagtgggaacatttgctttggagacagatgaactggattctgatcgtgaccctgctattttctccttgtgtgactttggagccatgagaccccagatcctgctgctcctggccctgctgaccctaggcctggctgcacaacaccaagacaaagtgccctgtaagatggtggacaagaaggtctcgtgccaggttctgggcctgctccaggtcccctcggtgctcccgccagacactgagacccttgatctatctgggaaccagctgcggagtatcctggcctcacccctgggcttctacacggcacttcgtcacctggacctgagcaccaatgagatcagcttcctccagccaggagccttccaggccctgacccacctggagcacctcagcctggctcacaaccggctggcgatggccactgcgctgagtgctggtggcctgggccccctgccacgcgtgacctccctggacctgtctgggaacagcctgtacagcggcctgctggagcggctgctgggggaggcacccagcctgcataccctctcactggcggagaacagtctgactcgcctcacccgccacaccttccgggacatgcctgcgctggagcagcttgacctgcatagcaacgtgctgatggacatcgaggatggcgccttcgagggcctgccccgcctgacccatctcaacctctccaggaattccctcacctgcatctccgacttcagcctccagcagctgcgggtgctagacctgagctgcaacagcatcgaggcctttcagacggcctcccagccccaggctgagttccagctcacctggcttgacctgcgggagaacaaactgctccatttccccgacctggccgcgctcccgagactcatctacctgaacttgtccaacaacctcatccggctccccacagggccaccccaggacagcaagggcatccacgcaccttccgagggctggtcagccctgcccctctcagcccccagcgggaatgccagcggccgccccctttcccagctcttgaatctggatttgagctacaatgagattgagctcatccccgacagctttcttgagcacctgacctccctgtgcttcctgaacctcagcagaaactgcttgcggacctttgaggcccggcgcttaggctccctgccctgcctgatgctccttgacttaagccacaatgccctggagacactggaactgggcgccagagccctggggtctctgcggacgctgctcctacagggcaatgccctgcgggacctgcccccatacacctttgccaatctggccagcctgcagcggctcaacctgcaggggaaccgagtcagcccctgtggggggccagatgagcctggcccctccggctgtgtggccttctccggcatcacctccctccgcagcctgagcctggtggataatgagatagagctgctcagggcaggggccttcctccacaccccactgactgagctggacctttcttccaatcctgggctggaggtggccacgggggccttgggaggcctggaggcctccttggaggtcctggcactgcagggcaacgggctgatggtcctgcaggtggacctgccctgcttcatctgcctcaagcggctcaatcttgccgagaaccgcctgagccaccttcccgcctggacacaggctgtgtcactggaggtgctggacctgcgaaacaacagcttcagcctcctgccaggcagtgccatgggtggcctggagaccagcctccggcgcctctacctgcaggggaatccactcagctgctgcggcaatggctggctggcagcccagctgcaccagggccgtgtggacgtggacgccacccaggacctgatctgccgcttcagctcccaggaggaggtgtccctgagccacgtgcgtcccgaggactgtgagaaggggggactgaagaacatcaacctcatcatcatcctcaccttcatactggtctctgccatcctcctcaccacgctggccgcctgctgctgcgtccgccggcagaagtttaaccaacagtataaagcctaaagaagccgggagacactctaggtcagtgggggagcctgaggtacagagaagagtgaggactgactcaaggtcacacagtgatccggatcccagaactctggtctccaaattacagcccaggacacctttctctgccgcctgctgcatcagtgggtgacccccttcccgggctgcactttgggtccagctgtggaagccagaagttgggcggtttcagggacagccgagaataatgttgacctgtcagatcaacaaatcttcactgagcatgtattttgtgccacaccctgctctgggcactgggaatgctgggaaatgagatacattcccgccctcaagaatctcccagtctggtaggagagagtgctgcagagccacgtggccgccacgcagtgtgcttagggcctgaggtgtgaaagcccagggctccagagctcggcaggccccgctggtttggtgcggtgagtcctgccccggctgtgcagggtgagggagggccaagccaggaggatttgtctgagacatttccaagcagactgtttgtcacgtcttctgagaatgactttcagtctctctgaaaatgaaaagcttaggaccggaagagagaattggagctgtacgagtgtgtctcggatctggtattgttaggtgggccacggcggctccagcagggtctggttaaggggtccagcccagcactggaccattccgtctcctgctctggacttgccctctcccttcctggcactctcatgttgcataccctgaccccagtgctgctctaagcaccgtccctgcccagccccacttctccatcgcagccccaccttggctgctgagccaggagctaaaaccttagatatctggttctgttttgcacccagcttggcagatgtggatttgaatccaagccttgtgtctgcccctatgtgacagctctatattttatccccgttttataaaagaggaaactgaagttctgaaaatctccttccagggccccagctaactaatgccataggtgagattcaaaccttcatccttctgtctccagggcctgatctttaccactgcaggggctgcaggccgttaagtggacaggaagtggccccacatagcccgagcagggtctggaagcatcctgtgctgtgcacacctgctctctcctctctcccaggcaggcagctgcaggcgctctcctccttctctgcctgtttccctcctcccttcctttccaccctggtgtgggttctcctgttctctctgtgctcttgcattctctcattcccttttcctctatggagcagagcctggagtttgagactatggaatccaacctccccattgcacagatggggaaactgaggcttaggaagagaatgaaacttgtggagagcttatacagaacctctgggggaaaaaagagcccttatttgtggggtgagattgggggttggaccagagtgatgtcctctctcagctatcacatcacaagataatgctggctccaaacttcctttctgtgcctcatcatgcaaggatcttttttccctcttacaaaaacaggtaaaaagcctcacccagatgacccccatccctcataccatggagtcatgagctgtctgggaagaatggacgtgctgggaccaactcaagaccttgttttgctgtcttcatcatcttacctgtgcttggcccacagtctggctcatgatgtgggctcagtaatgtgcgagaaagtgaaaatgccactctctccaccccattttacagaggagaacaccaaggcccagaggaagttaagggagagtcaatgggcagagccagggctaggccctggtggtgtgtggagcacccaggcagacccagtcctggttgggatcacacccacgggtgctactgcacgtaacactcctccttaggcctggaggccaaggtgtgggtccccacgcctgatctttgaaaacactacacagggctgctgtcacttcccagggcccaggcctcagcccaggcctcgggaccaactctttgtataacctacctgaatgtattaaaaactaattttggaaaaaaaaaa

SEQ ID NO: 529 - DNA, 43058 bp, Homo sapiens; identical to SEQ ID NO: 292

SEQ ID NO: 530 - DNA, 9517 bp, Homo sapiens
gttgctgtcggagagagaaagccgcacccgagaggaggtgtgggtgttccgcttccatcctaacggaacgagctccctcttcgcggacatgggattacccagcggctgctaacccctctcctcgccctgctcccccaaaccggcgtggctccccgggcaccaaggagctgactacagaggagcaggatttgcacccctcgctgggcttgctttggcaacagagtgcctgacccaggtcaggattttcaagaaagacatgtctgacaaaatgtctagcttcctacatattggagacatttgttctctgtacgcggagggatcgacaaatggatttattagcaccttgggcctggttgatgatcgttgtgttgtacagccagaaaccggggaccttaacaatccacctaagaaattcagagactgcctctttaagctatgtcccatgaaccgctactctgcccaaaagcagttctggaaagccgctaagcctggggccaacagcaccacagacgcagtgctactcaacaaactgcaccacgctgcagacttggaaaagaagcagaatgagacagaaaacaggaaattgctggggaccgtaatccagtatggcaatgtgatccagctcctgcatttgaaaagtaataaatacctaacagtgaataagaggcttcctgctctgttggagaagaatgccatgagagtcacattggacgaggctggaaatgaagggtcctggttttatattcagccattctacaagctgcgatccattggagacagcgtggtcataggtgacaaggtggttctgaaccccgtcaatgctggtcagcccctacatgctagcagccatcaactggtagataacccaggctgcaatgaggtcaattccgtcaactgcaatacaagctggaaaatagtccttttcatgaaatggagtgataacaaagacgacatattaaaggggggtgacgtggtgaggctgtttcatgctgagcaggagaagtttctcacctgtgacgaacacaggaagaagcagcacgtcttcctgagaaccacgggccggcagtcggccacatctgccaccagttcaaaagccctgtgggaggtggaggtggtccagcatgacccatgtcggggcggagcagggtattggaacagccttttccgtttcaagcatctggccacggggcattacttggcagcagaggtggaccctgatcaggacgcctctcgaagtaggttgcggaatgcccaagaaaagatggtatactccctggtctctgtgcctgaaggcaatgacatctcctccattttcgagctagatcccaccactctgcgtggaggtgacagccttgtcccaaggaactcttatgttcggctcagacacctatgtactaatacctgggttcacagcacaaatattcctattgacaaggaagaagaaaagcccgtgatgctgaaaattggcacctctcctgtgaaggaggataaggaagcatttgccatagttccggtttctcctgctgaagttcgggacctggactttgccaatgatgccagcaaggtgctgggctccattgctgggaagctagagaagggcaccatcacccagaatgaaaggaggtctgtaaccaagctgctagaagatttggtttacttcgtcactggtggaactaattctggtcaagatgttctcgaagttgtcttctccaagcccaacagagaacggcagaaactgatgagagaacagaatattctcaagcagatcttcaagttgttacaagccccattcacagactgcggtgatggcccaatgcttcggctggaagagctcggggaccagcggcacgctcctttcagacacatctgccggctctgctacagggtgctgagacactcgcagcaagactacaggaagaaccaggagtatatagccaagcagtttggcttcatgcagaagcagattggctatgatgtgttggctgaagacactatcactgccctgctccacaataatcggaaactcctggaaaaacacattaccgcggcagagattgacacatttgtcagcctggtgcgaaagaacagggagcccagattcttagattacctctccgacctctgtgtctccatgaacaaatcaattccagtgacccaggaactgatatgtaaagctgtgctgaaccccaccaacgctgacatcctgattgagaccaaattggttctttctcgttttgaatttgaaggtgtctcttccactggagagaatgctctggaggcaggagaagacgaggaagaggtgtggctgttttggagggacagcaacaaagagattcgcagcaagagtgtgagggaattggctcaggatgctaaagaagggcagaaggaggaccgagacgttctcagctactacagatatcagctgaacctctttgcgaggatgtgtctggaccgccaatacctggccatcaacgaaatctcaggccagctggatgtcgatctcattctccgctgcatgtctgacgagaacctgccctatgacctcagggcgtccttctgccgcctcatgcttcacatgcatgtggaccgagatccccaggaacaagtcacccccgtgaaatatgcccgcctctggtcggagattccctcggagatcgccattgacgactatgatagtagtggagcttccaaagatgaaattaaggagagatttgctcagaccatggagtttgtggaggagtatttaagagatgtggtttgtcagaggttccctttctctgataaagagaagaataagcttacgtttgaggttgtaaatttagctaggaatctcatatactttggtttctacaacttctctgaccttctccgattaactaagatccttctggccatattggactgtgtacatgtgacaacaatcttccccattagcaagatggcgaaaggagaagagaataaaggcagtaacgtgatgagatctattcatggcgtgggagagctgatgacccaggtggtgctccggggaggaggctttttgcccatgactcccatggctgctgcccctgaaggcaatgtgaagcaggcagagcctgagaaggaggacatcatggtcatggacaccaagctgaagatcattgagatactccagtttattttgaatgtgaggttggattataggatctcctgcctcctgtgtatatttaagcgagagtttgatgaaagcaattcccagacttcagaaacatcctccggaaacagcagccaagaagggccaagtaatgtaccaggtgctcttgactttgaacacattgaagaacaagcagaaggcatctttggaggaagtgaggagaacaccccactggacttggatgaccacggcggcagaacctttctccgtgtcctgctccacttgacgatgcatgactacccacccctggtgtcaggggccctgcagctcctcttccggcacttcagccagaggcaggaggtgctccaggccttcaaacaggttcaactgctggttaccagccaagatgtggacaactacaaacagatcaaacaagacttggatcaactgaggtccatcgtggaaaagtcagagctttgggtgtacaaagggcagggccccgatgagactatggatggtgcatctggagaaaatgaacataagaaaacggaggagggaaataacaagccacaaaagcatgaaagcaccagcagctacaactacagagtggtcaaagagattttgattcggcttagcaaactctgtgttcaagagagtgcctcagtgagaaagagcaggaagcagcaacagcgtctgctccggaacatgggcgcgcacgccgtggtgctggagctgctgcagattccctatgagaaggccgaagataccaagatgcaagagataatgaggttggctcatgaatttttgcagaatttctgcgcaggcaaccagcagaatcaagctttgctacataaacacataaacctgtttctcaacccagggatcctggaggcagtaaccatgcagcacatcttcatgaacaatttccagctttgcagtgagatcaacgagagagttgttcagcacttcgttcactgcatagagactcacggtcggaatgtccagtatataaagttcttacagacaattgtcaaggcagaagggaaatttattaaaaaatgccaagacatggttatggccgagctggtcaattcgggagaggatgtcctcgtgttctacaacgacagagcctctttccagactctgatccagatgatgcggtcagaacgggatcggatggatgagaacagccctctcatgtaccacatccacttggtcgagctcctggctgtgtgcacggagggtaagaatgtctacacagagatcaagtgcaactccctgctcccgctggatgacatcgttcgcgtggtgacccacgaggactgcatccctgaggttaaaattgcatacattaacttcctgaatcactgctatgtggatacagaggtggaaatgaaggagatttataccagcaatcacatgtggaaattgtttgagaatttccttgtagacatctgcagggcctgtaacaacactagtgacaggaaacatgcagactcgattttggagaagtatgtcaccgaaatcgtcatgagtattgttactactttcttcagctctcccttctcagaccagagtacgactttgcagactcgccagcctgtctttgtgcaactgctgcaaggcgtgttcagggtttaccactgcaactggttaatgccaagccaaaaagcctccgtggagagctgtattcgggtgctgtctgatgtagccaagagccgggccattgccattcccgtggacctggacagccaagtcaacaacctctttctcaagtcccacagcattgtgcagaaaacagccatgaactggcggctctcagcccgcaatgccgcacgcagggactctgttctggcagcttccagagactaccggaatatcattgagagattgcaggacatcgtctccgcgctggaggaccgtctcaggcccctggtgcaggcagagttatctgtgctcgtggatgttctccacagacccgagctgcttttcccagagaacacagacgccagaaggaaatgtgaaagtggcggtttcatttgcaagttaataaagcatacaaaacagctgctagaagaaaatgaagagaagctctgcattaaggtcctacagaccctgagggaaatgatgaccaaagatagaggctatggagaaaagggtgaggcgctcaggcaagttctggtcaaccgttactatggaaacgtcagaccttcgggacgaagagagagccttaccagctttggcaatggcccactgtcagcaggaggacccggcaagcccgggggaggagggggaggttccggatccagctctatgagcaggggtgagatgagtctggccgaggttcagtgtcaccttgacaaggagggggcttccaatctagttatcgacctcatcatgaacgcatccagtgaccgagtgttccatgaaagcattctcctggccattgcccttctggaaggaggcaacaccaccatccagcactcctttttctgtcgcttgacagaagataagaagtcagagaaattctttaaggtgttttatgaccggatgaaggtggcccagcaagaaatcaaagcaacagtgacagtgaacaccagtgacttgggaaataaaaagaaagacgatgaggtagacagggatgccccatcacggaaaaaagctaaagagcccacaacacagataacagaagaggtccgggatcagctcctggaggcctccgctgccaccaggaaagccttcaccactttcaggagggaggctgatcccgacgaccactaccagcctggagagggcacccaggccactgccgacaaggccaaggacgacctggagatgagcgcggtcatcaccatcatgcagcccatcctccgcttccttcagctcctgtgtgaaaaccacaaccgagacctgcagaacttcctccgttgccaaaataacaagaccaactacaatttggtatgtgagaccctgcagtttctggactgtatttgtggaagcacaactggaggccttggtcttctgggcttgtatataaatgaaaagaacgtagcgcttatcaaccaaaccctggaaagtctgaccgaatactgtcaaggaccttgccatgagaaccagaactgcatagccacccatgaatccaatggcattgacatcatcacagccctgatcctcaatgatatcaatcctttgggaaagaagaggatggaccttgtgttagaactgaagaacaatgcctcgaagttgctcctggccatcatggaaagcaggcacgacagtgaaaacgcagagaggatactttataacatgaggcccaaggaactggtggaagtgatcaagaaagcctacatgcaaggtgaagtggaatttgaggatggagaaaacggtgaggatggggcggcgtcccccaggaacgtggggcacaacatctacatattagcccatcagttggctcggcataacaaagaacttcagagcatgctgaaacctggtggccaagtggacggagatgaagccctggagttttatgccaagcacacggcgcagatagagattgtcagattagaccgaacaatggaacagatagtctttcccgtgcccagcatatgtgaattcctaaccaaggagtcaaaactacgaatttactatactacagagagagacgaacaaggcagcaaaatcaatgatttctttctgcggtctgaagacctcttcaatgaaatgaattggcagaagaaactgagagcccagcccgtgttgtactggtgtgcccgcaacatgtctttctggagcagcatttcgtttaacctggccgtcctgatgaacctgctggtggcgtttttctacccgtttaagggagtccgaggaggaaccctggagccccactggtcgggactcctgtggacagccatgctcatctctctggccatcgtcattgccctccccaagccccatggcatccgggccttaattgcctccacaattctacgactgatattttcagtcgggttacaacccacgttgtttcttctgggcgctttcaatgtatgcaataaaatcatctttctaatgagctttgtgggcaactgtgggacattcacaagaggctaccgagccatggttctggatgttgagttcctctatcatttgttgtatctggtgatctgtgccatggggctctttgtccatgaattcttctacagtctgctgctttttgatttagtgtacagagaagagactttgcttaatgtcattaaaagtgtcactcgcaatggacggtccatcatcctgacagcagttctggctctgatcctcgtttacctgttctcaatagtgggctatcttttcttcaaggatgactttatcttggaagtagataggctgcccaatgaaacagctgttccagaaaccggcgagagtttggcaagcgagttcctgttctccgatgtgtgtagggtggagagtggggagaactgctcctctcctgcacccagagaagagctggtccctgcagaagagacggaacaggataaagagcacacatgtgagacgctgctgatgtgcattgtcaccgtgctgagtcacgggctgcggagcgggggtggagtaggagatgtactcaggaaaccgtccaaagaggaacccctgtttgctgctagagttatttatgacctcttgttcttcttcatggtcatcatcattgttcttaacctgatttttggggttatcattgacacttttgctgacctgaggagtgagaagcagaagaaggaagagatcttgaagaccacgtgctttatctgtggcttggaaagagacaagtttgacaacaagactgtcacctttgaagagcacatcaaggaagaacacaacatgtggcactatctgtgcttcatcgtcctggtgaaagtaaaggactccaccgaatatactgggcctgagagttacgtggcagaaatgatcaaggaaagaaaccttgactggttccccaggatgagagccatgtcattggtcagcagtgattctgaaggagaacagaatgagctgagaaacctgcaggagaagctggagtccaccatgaaacttgtcacgaacctttctggccagctgtcggaattaaaggatcagatgacagaacaaaggaagcagaaacaaagaattggtcttctaggacatcctcctcacatgaatgtcaacccacaacaaccagcataagcaaatgaaagaaaggaattgtatttaccttttataattattattagtgtgggtatggctaatgagttctgattcacccacgaaggttacatttatgctgaatacatttgtaaatactcagttttatactgtatgtatatgattgctactctaaaggtttggatatatgtattgtaattagaattgttggcatgatgacatttcatttgtgccaaaaatattaaaaatgccttttttggaaggactaacagaaagcacctgatttgcacttgaaccagattatagatttaaaagtatatgacatgtattttgtatttaaaactagaatagccagtatttatgttttttataaaactgtgcaatacgaattatgcaatcacaatacatttgtagctcccgagtgtcctaaagggagtgcacttctttgaagctggtgtgttaatactatgtaataaatggttaactttcaaatgatgctgctgccaaaattatattaatagtgagtttcaggcccctgggcattttgtaccatgtaattatcctctggtgatgctgtttctcgttagtggcagtagtgcctccgtctcctagtgataatgctccaagtctatgaactgttaaatcagcattcattttaagaaaagcaactttagtttcaaagatacttttaagcttctaaattgatcatttaaactatttctttaaataagagagccaaattagaggctcatactttagcttgtgaagaagataatgaattttttaaagggaactttctatgcaatgttcaggataaatcgatactgctggccaatcagtgtcatctcctgggtaaattttgatgtcgcattataaagacatgcataattgatggtttctagattatctagtccaaacaatagagtttattttttcttcatctgaaccaacatgctacagtagctaagaagtattaaaactatatacatccatataaagatgaaatatgaactatctcattagaagtcatagttgaccacagacatgttattcttctgaaagagccacattttggttttatttcttgtcacatgatttcttttcttgatggatgaaaaatatgaaatgaaatcttttatatctgttgcctagttttgtacatggatctcattttacaagagaatctctctgcta

SEQ ID NO: 531 - DNA, 4409 bp, Homo sapiens
tttcgactcgcgctccggctgctgtcacttggctctctggctggagcttgaggacgcaaggagggtttgtcactggcagactcgagactgtaggcactgccatggcccctgtgctcagtaaggactcggcggacatcgagagtatcctggctttaaatcctcgaacacaaactcatgcaactctgtgttccacttcggccaagaaattagacaagaaacattggaaaagaaatcctgataagaactgctttaattgtgagaagctggagaataattttgatgacatcaagcacacgactcttggtgagcgaggagctctccgagaagcaatgagatgcctgaaatgtgcagatgccccgtgtcagaagagctgtccaactaatcttgatattaaatcattcatcacaagtattgcaaacaagaactattatggagctgctaagatgatattttctgacaacccacttggtctgacttgtggaatggtatgtccaacctctgatctttgtgtaggtggatgcaatttatatgccactgaagagggacccattaatattggtggattgcagcaatttgctactgaggtattcaaagcaatgagtatcccacagatcagaaatccttcgctgcctcccccagaaaaaatgtctgaagcctattctgcaaagattgctctttttggtgctgggcctgcaagtataagttgtgcttcctttttggctcgattggggtactctgacatcactatatttgaaaaacaagaatatgttggtggtttaagtacttctgaaattcctcagttccggctgccgtatgatgtagtgaattttgagattgagctaatgaaggaccttggtgtaaagataatttgcggtaaaagcctttcagtgaatgaaatgactcttagcactttgaaagaaaaaggctacaaagctgctttcattggaataggtttgccagaacccaataaagatgccatcttccaaggcctgacgcaggaccaggggttttatacatccaaagactttttgccacttgtagccaaaggcagtaaagcaggaatgtgcgcctgtcactctccattgccatcgatacggggagtcgtgattgtacttggagctggagacactgcctttgactgtgcaacatctgctctacgttgtggagctcgccgtgtgttcatcgtcttcagaaaaggctttgttaatataagagctgtccctgaggagatggaacttgctaaggaagaaaagtgtgaatttctgccattcctgtccccacggaaggttatagtaaaaggtgggagaattgttgctatgcagtttgttcggacagagcaagatgaaactggaaaatggaatgaagatgaagatcagatggtccatctgaaagccgatgtggtcatcagtgcctttggttcagttctgagtgatcctaaagtaaaagaagccttgagccctataaaatttaacagatggggtctcccagaagtagatccagaaactatgcaaactagtgaagcatgggtatttgcaggtggtgatgtcgttggtttggctaacactacagtggaatcggtgaatgatggaaagcaagcttcttggtacattcacaaatacgtacagtcacaatatggagcttccgtttctgccaagcctgaactacccctcttttacactcctattgatctggtggacattagtgtagaaatggccggattgaagtttataaatccttttggtcttgctagcgcaactccagccaccagcacatcaatgattcgaagagcttttgaagctggatggggttttgccctcaccaaaactttctctcttgataaggacattgtgacaaatgtttcccccagaatcatccggggaaccacctctggccccatgtatggccctggacaaagctcctttctgaatattgagctcatcagtgagaaaacggctgcatattggtgtcaaagtgtcactgaactaaaggctgactttccagacaacattgtgattgctagcattatgtgcagttacaataaaaatgactggacggaacttgccaagaagtctgaggattctggagcagatgccctggagttaaatttatcatgtccacatggcatgggagaaagaggaatgggcctggcctgtgggcaggatccagagctggtgcggaacatctgccgctgggttaggcaagctgttcagattcctttttttgccaagctgaccccaaatgtcactgatattgtgagcatcgcaagagctgcaaaggaaggtggtgccaatggcgttacagccaccaacactgtctcaggtctgatgggattaaaatctgatggcacaccttggccagcagtggggattgcaaagcgaactacatatggaggagtgtctgggacagcaatcagacctattgctttgagagctgtgacctccattgctcgtgctctgcctggatttcccattttggctactggtggaattgactctgctgaaagtggtcttcagtttctccatagtggtgcttccgtcctccaggtatgcagtgccattcagaatcaggatttcactgtgatcgaagactactgcactggcctcaaagccctgctttatctgaaaagcattgaagaactacaagactgggatggacagagtccagctactgtgagtcaccagaaagggaaaccagttccacgtatagctgaactcatggacaagaaactgccaagttttggaccttatctggaacagcgcaagaaaatcatagcagaaaacaagattagactgaaagaacaaaatgtagctttttcaccacttaagagaaactgttttatccccaaaaggcctattcctaccatcaaggatgtaataggaaaagcactgcagtaccttggaacatttggtgaattgagcaacgtagagcaagttgtggctatgattgatgaagaaatgtgtatcaactgtggtaaatgctacatgacctgtaatgattctggctaccaggctatacagtttgatccagaaacccacctgcccaccataaccgacacttgtacaggctgtactctgtgtctcagtgtttgccctattgtcgactgcatcaaaatggtttccaggacaacaccttatgaaccaaagagaggcgtacccttatctgtgaatccggtgtgttaaggtgatttgtgaaacagttgctgtgaactttcatgtcacctacatatgctgatcttttaaaatcatgatccttgtgttcagctctttccaaattaaaacaaatatacattttctaaataaaaatatgtaatttcaaaatacatttgtaagtgtaaaaaatgtctcatgtcaatgaccattcaattagtggtcataaaatagaataattcttttctgaggatagtagttaaataactgtgtggcagttaattggatgttcactgccagttgtcttatgtgaaaaattaacttttttgtggcaattagtgtgacagtttccaaattgccctatgctgtgctccatatttgatttctaattgtaagtgaaattaagcattttgaaacaaagtactctttaacatacaagaaaatgtatccaaggaaacattttatcattaaaaattacctttaattttaatgctgtttctaagaaaatgtagttagctccataaagtacaaatgaagaaagtcaaaaaattatttgctatggcaggataagaaagcctaaaattgagtttgtagaactttattaagtaaaatccccttcgctgaaattgcttatttttggtgttggatagaggatagggagaatatttactaactaaataccattcactactcatgcgtgagatgggtgtacaaactcatcctcttttaatggcatttctctttaaactatgttcctaacaaaatgagatgataggatagatcctggttaccactcttttgctgtgcacatacgggctctgactggttttaatagtcaccttcatgattatagcaactaatgtttgaacaaagctcaaagtatgcaatgcttcattattcaagaatgaaaaatataatgttgataatatatattaagtgtgccaaatcagtttgactactctctgttttagtgtttatgtttaaaagaaatatattttttgttattattagataatatttttgtatttctctattttcataatcagtaaatagtgtcatataaactcatttatctcctcttcatggcatcttcaatatgaatctataagtagtaaatcagaaagtaacaatctatggcttatttctatgacaaattcaagagctagaaaaataaaatgtttcattatgcacttttagaaatgcatatttgccacaaaacctgtattactgaataatatcaaataaaatatcataaagcatttt

SEQ ID NO: 532 - DNA, 2532 bp, Homo sapiens
agtgcactcaagcagagaagaaatccacaaagactcaccagtctgctggtgggcagagaagacagaaacgacatgagcacagcaggaaaagtaatcaaatgcaaagcagctgtgctatgggaggtaaagaaacccttttccattgaggatgtggaggttgcacctcctaaggcttatgaagttcgcattaagatggtggctgtaggaatctgtcgcacagatgaccacgtggttagtggcaacctggtgaccccccttcctgtgattttaggccatgaggcagccggcatcgtggagagtgttggagaaggggtgactacagtcaaaccaggtgataaagtcatcccgctctttactcctcagtgtggaaaatgcagagtttgtaaaaacccggagagcaactactgcttgaaaaatgatctaggcaatcctcgggggaccctgcaggatggcaccaggaggttcacctgcagggggaagcccattcaccacttccttggcaccagcaccttctcccagtacacggtggtggatgagaatgcagtggccaaaattgatgcagcctcgcccctggagaaagtctgcctcattggctgtggattctcgactggttatgggtctgcagttaacgttgccaaggtcaccccaggctctacctgtgctgtgtttggcctgggaggggtcggcctatctgctgttatgggctgtaaagcagctggagcagccagaatcattgcggtggacatcaacaaggacaaatttgcaaaggccaaagagttgggtgccactgaatgcatcaaccctcaagactacaagaaacccatccaggaagtgctaaaggaaatgactgatggaggtgtggatttttcgtttgaagtcatcggtcggcttgacaccatgatggcttccctgttatgttgtcatgaggcatgtggcacaagcgtcatcgtaggggtacctcctgcttcccagaacctctcaataaaccctatgctgctactgactggacgcacctggaagggggctgtttatggtggctttaagagtaaagaaggtatcccaaaacttgtggctgattttatggctaagaagttttcactggatgcgttaataacccatgttttaccttttgaaaaaataaatgaaggatttgacctgcttcactctgggaaaagtatccgtaccgtcctgacgttttgaggcaatagagatgccttcccctgtagcagtcttcagcctcctctaccctacgagatctggagcaacagctaggaaatatcattaattcagctcttcagagatgttatcaataaattacacatgggggctttccaaagaaatggaaattgatgggaaattatttttcaggaaaatttaaaattcaagtcagaagtaaataaagtgttgaacatcagctggggaattgaagccaacaaaccttccttcttaaccattctactgtgtcacctttgccattgaggaaaaatattcctgtgacttcttgcatttttggtatcttcataatctttagtcatcgaatcccagtggaggggacccttttacttgccctgaacatacacatgctgggccattgtgattgaagtcttctaactctgtctcagttttcactgtcgacattttcctttttctaataaaaatgtaccaaatccctggggtaaaagctagggtaaggtaaaggatagactcacatttacaagtagtgaaggtccaagagttctaaatacaggaaatttcttaggaactcaaataaaatgcccacattttactacagtaaatggcagtgtttttatgacttttatactatttctttatggtcgatatacaattgattttttaaaataatagcagatttcttgcttcatatgacaaagcctcaattactaattgtaaaaactgaactattcccagaatcatgttcaaaaaatctgtaattttgctgatgaaagtgcttcattgactaaacagtattagtttgtggctataaatgattatttaggatgatgactgaaaatgtgtataagtaattaaaagtaatatggtggctttaagtgtagagatgggatggcaaatgctgtgaatgcagaatgtaaaattggtaactaagaaatggcacaaacaccttaagcaatatattttcctagtagatatatatatacacatacatatatacacatatacaaatgtatatttttgcaaaattgttttcaatctagaacttttctattaactaccatgtcttaaaatcaagtctataatcctagcattagtttaatattttgaatatgtaaagacctgtgttaatgctttgttaatgcttttcccactctcatttgttaatgctttcccactctcaggggaaggatttgcattttgagctttatctctaaatgtgacatgcaaagattattcctggtaaaggaggtagctgtctccaaaaatgctattgttgcaatatctacattctatttcatattatgaaagaccttagacataaagtaaaatagtttatca

SEQ ID NO: 533 - DNA, 2276 bp, Homo sapiens
ccagctcagagcctagacctccagccgagcggtttgcagccgcgggcggcggcggcggcggcggcgttgagtgtctggcccgccggtccggtcggggtgtgcagtcggacggacgagcagcgcgtcgctgtcctccggcagctggagatgtccgagcccaaggcaattgatcccaagttgtcgacgaccgacagggtggtgaaagctgttccatttcctccaagtcaccggcttacagcaaaagaagtgtttgataatgatggaaaacctcgtgtggatatcttaaaggcgcatcttatgaaggagggaaggctggaagagagtgttgcattgagaataataacagagggtgcatcaattcttcgacaggaaaaaaatttgctggatattgatgcgccagtcactgtttgtggggacattcatggacaattctttgatttgatgaagctctttgaagtcgggggatctcctgccaacactcgctacctcttcttaggggactatgttgacagagggtacttcagtattgaatgtgtgctgtatttgtgggccttgaaaattctctaccccaaaacactgtttttacttcgtggaaatcatgaatgtagacatctaacagagtatttcacatttaaacaagaatgtaaaataaagtattcagaacgagtatatgatgcctgtatggatgcctttgactgccttcccctggctgccctgatgaaccaacagttcctgtgtgtgcatggtggtttgtctccagagattaacactttagatgatatcagaaaattagaccgattcaaagaaccacctgcatatggacctatgtgtgatatcctgtggtcagaccccctggaagattttggaaatgagaagactcaggaacatttcactcacaacacagtcagggggtgttcatacttctacagttacccggctgtatgtgaattcttacagcacaataacttgttatctatactccgagcccacgaagcccaagatgcagggtaccgcatgtacaggaaaagccaaacaacaggcttcccttctctaattacaattttttcagcaccaaattacttagatgtatacaataacaaagctgcagtattgaagtatgagaacaatgttatgaatatcaggcaattcaactgttctcctcatccatactggcttccaaatttcatggatgtttttacttggtcccttccatttgttggggaaaaagtgactgagatgctggtaaatgtcctcaacatctgctcagatgatgaactagggtcagaagaagatggatttgatggtgcaacagctgcagcccggaaagaggtgataaggaacaagatccgagcaataggcaaaatggccagagtgttctcagtgctcagagaagagagtgagagtgtgctgacgctgaaaggcttgaccccaactggcatgctccccagcggagtactttctggagggaagcaaaccctgcaaagcgctactgttgaggctattgaggctgatgaagctatcaaaggattttcaccacaacataagatcactagcttcgaggaagccaagggcttagaccgaattaatgagaggatgccgcctcgcagagatgccatgccctctgacgccaaccttaactccatcaacaaggctctcacctcagagactaacggcacggacagcaatggcagtaatagcagcaatattcagtgaccacttcctgttcacattttttttttttttttttttttttttttttttgagctgcggggcatgatggggattgctgcatatcagcagttggatgttcttgcctctgacagtagcttatttgctctgggggccaggaattggattcagtttacactatcattaaaaaagagggagagagataataaactatattttggtggggatggtgattaaacacctcttttgggtatgccttttaaaaatgcttatagagaaaaaaaattttaaaaaaagaaagctaatgctagtatatactgcaatgttaggggaatgaacatgttttcctactgcattggggacttctagataggttaatgaaaggccttttattctgttactggacatgaaaactttgtctaatttcttactctattgtacgtttacagtcgcagcactaaaaatggatgacatcaaacatttttaacaaaatgatgatgtacaaactaaggactatttattgataatgttttgctactcttgtcagacaatggctataaactgaattaggcagtcttaaaaaaaaa

SEQ ID NO: 534 - DNA, 2244 bp, Homo sapiens
gcacgggacaggccgggccacacccaccggggcgagctcggagggcggcgctctgggcggagggcccggcggctcggcccagggcgcgttacctcgtcgccggggccggagagggcgggcggaggcacggggcctggaggcgccaggcggaggatgcgggcgacacggtggcggcggcgaccgcgcgaccgggcgggcgggcgggcaggggcgagcggagggagggagcggactgcggcaggatctgtcgaggaaaaatcttgcggccggcgattccccgccttttaagcgcagcctgcactccccccaccccacgcaggggcgggccttccccaacgcgggcgcccactggccgccgcgcgccgctcccctccagctcgcctgcgcctctcactctccgtcagccgcattgcccgctcggcgtccggcccccgacccgcgctcgtccgcccgcccgcccgcccgcccgcgccatgaacgccaaggtcgtggtcgtgctggtcctcgtgctgaccgcgctctgcctcagcgacgggaagcccgtcagcctgagctacagatgcccatgccgattcttcgaaagccatgttgccagagccaacgtcaagcatctcaaaattctcaacactccaaactgtgcccttcagattgtagcccggctgaagaacaacaacagacaagtgtgcattgacccgaagctaaagtggattcaggagtacctggagaaagctttaaacaagtaagcacaacagccaaaaaggactttccgctagacccactcgaggaaaactaaaaccttgtgagagatgaaagggcaaagacgtgggggagggggccttaaccatgaggaccaggtgtgtgtgtggggtgggcacattgatctgggatcgggcctgaggtttgccagcatttagaccctgcatttatagcatacggtatgatattgcagcttatattcatccatgccctgtacctgtgcacgttggaatttttattactggggtttttctaagaaagaaattgtattatcaacagcattttcaagcagttagttccttcatgatcatcacaatcatcatcattctcattctcattttttaaatcaacgagtacttcaagatctgaatttggcttgtttggagcatctcctctgctcccctggggagtctgggcacagtcaggtggtggcttaacagggagctggaaaaagtgtcctttcttcagacactgaggctcccgcagcagcgcccctcccaagaggaaggcctctgtggcactcagataccgactggggctgggcgccgccactgccttcacctcctctttcaacctcagtgattggctctgtgggctccatgtagaagccactattactgggactgtgctcagagacccctctcccagctattcctactctctccccgactccgagagcatgcattaatcttgcttctgcttctcatttctgtagcctgatcagcgccgcaccagccgggaagagggtgattgctggggctcgtgccctgcatccctctcctcccagggcctgccccacagctcgggccctctgtgagatccgtctttggcctcctccagaatggagctggccctctcctggggatgtgtaatggtccccctgcttacccgcaaaagacaagtctttacagaatcaaatgcaattttaaatctgagagctcgctttgagtgactgggttttgtgattgcctctgaagcctatgtatgccatggaggcactaacaaactctgaggtttccgaaatcagaagcgaaaaaatcagtgaataaaccatcatcttgccactaccccctcctgaagccacagcagggtttcaggttccaatcagaactgttggcaaggtgacatttccatgcataaatgcgatccacagaaggtcctggtggtatttgtaactttttgcaaggcatttttttatatatatttttgtgcacatttttttttacgtttctttagaaaacaaatgtatttcaaaatatatttatagtcgaacaattcatatatttgaagtggagccatatgaatgtcagtagtttatacttctctattatctcaaactactggcaatttgtaaagaaatatatatgatatataaatgtgattgcagcttttcaatgttagccacagtgtattttttcacttgtactaaaattgtatcaaatgtgacattatatgcactagcaataaaatgctaattgtttcatggta

SEQ ID NO: 535 - DNA, 2300 bp, Homo sapiens
cagcacgtctcttgctcctcagggccactgccaggcttgccgagtcctgggactgctctcgctccggctgccactctcccgcgctctcctagctccctgcgaagcaggatggccgggaccgtgcgcaccgcgtgcttggtggtggcgatgctgctcagcttggacttcccgggacaggcgcagcccccgccgccgccgccggacgccacctgtcaccaagtccgctccttcttccagagactgcagcccggactcaagtgggtgccagaaactcccgtgccaggatcagatttgcaagtatgtctccctaagggcccaacatgctgctcaagaaagatggaagaaaaataccaactaacagcacgattgaacatggaacagctgcttcagtctgcaagtatggagctcaagttcttaattattcagaatgctgcggttttccaagaggcctttgaaattgttgttcgccatgccaagaactacaccaatgccatgttcaagaacaactacccaagcctgactccacaagcttttgagtttgtgggtgaatttttcacagatgtgtctctctacatcttgggttctgacatcaatgtagatgacatggtcaatgaattgtttgacagcctgtttccagtcatctatacccagctaatgaacccaggcctgcctgattcagccttggacatcaatgagtgcctccgaggagcaagacgtgacctgaaagtatttgggaatttccccaagcttattatgacccaggtttccaagtcactgcaagtcactaggatcttccttcaggctctgaatcttggaattgaagtgatcaacacaactgatcacctgaagttcagtaaggactgtggccgaatgctcaccagaatgtggtactgctcttactgccagggactgatgatggttaaaccctgtggcggttactgcaatgtggtcatgcaaggctgtatggcaggtgtggtggagattgacaagtactggagagaatacattctgtcccttgaagaacttgtgaatggcatgtacagaatctatgacatggagaacgtactgcttggtctcttttcaacaatccatgattctatccagtatgtccagaagaatgcaggaaagctgaccaccactattggcaagttatgtgcccattctcaacaacgccaatatagatctgcttattatcctgaagatctctttattgacaagaaagtattaaaagttgctcatgtagaacatgaagaaaccttatccagccgaagaagggaactaattcagaagttgaagtctttcatcagcttctatagtgctttgcctggctacatctgcagccatagccctgtggcggaaaacgacaccctttgctggaatggacaagaactcgtggagagatacagccaaaaggcagcaaggaatggaatgaaaaaccagttcaatctccatgagctgaaaatgaagggccctgagccagtggtcagtcaaattattgacaaactgaagcacattaaccagctcctgagaaccatgtctatgcccaaaggtagagttctggataaaaacctggatgaggaagggtttgaaagtggagactgcggtgatgatgaagatgagtgcattggaggctctggtgatggaatgataaaagtgaagaatcagctccgcttccttgcagaactggcctatgatctggatgtggatgatgcgcctggaaacagtcagcaggcaactccgaaggacaacgagataagcacctttcacaacctcgggaacgttcattccccgctgaagcttctcaccagcatggccatctcggtggtgtgcttcttcttcctggtgcactgactgcctggtgcccagcacatgtgctgccctacagcaccctgtggtcttcctcgataaagggaaccactttcttatttttttctatttttttttttttgttatcctgtatacctcctccagccatgaagtagaggactaaccatgtgttatgttttcgaaaatcaaatggtatcttttggaggaagatacattttagtggtagcatatagattgtccttttgcaaagaaagaaaaaaaaccatcaagttgtgccaaattattctcctatgtttggctgctagaacatggttaccatgtctttctctctcactccctccctttctatcgttctctctttgcatggatttctttgaaaaaaaataaattgctcaaataaaaaaaaaaaaaaaaaaaaaaaaaaaaaaaaaaaaaaaaaaaaaaaaaaaaaaaaaaaaaaaaaaaaaaaaaaa

SEQ ID NO: 536 - DNA, 1450 bp, Homo sapiens
gatgcacttgagcagggaagaaatccacaaggactcaccagtctcctggtctgcagagaagacagaatcaacatgagcacagcaggaaaagtaatcaaatgcaaagcagctgtgctatgggagttaaagaaacccttttccattgaggaggtggaggttgcacctcctaaggcccatgaagttcgtattaagatggtggctgtaggaatctgtggcacagatgaccacgtggttagtggtaccatggtgaccccacttcctgtgattttaggccatgaggcagccggcatcgtggagagtgttggagaaggggtgactacagtcaaaccaggtgataaagtcatcccactcgctattcctcagtgtggaaaatgcagaatttgtaaaaacccggagagcaactactgcttgaaaaacgatgtaagcaatcctcaggggaccctgcaggatggcaccagcaggttcacctgcaggaggaagcccatccaccacttccttggcatcagcaccttctcacagtacacagtggtggatgaaaatgcagtagccaaaattgatgcagcctcgcctctagagaaagtctgtctcattggctgtggattttcaactggttatgggtctgcagtcaatgttgccaaggtcaccccaggctctacctgtgctgtgtttggcctgggaggggtcggcctatctgctattatgggctgtaaagcagctggggcagccagaatcattgcggtggacatcaacaaggacaaatttgcaaaggccaaagagttgggtgccactgaatgcatcaaccctcaagactacaagaaacccatccaggaggtgctaaaggaaatgactgatggaggtgtggatttttcatttgaagtcatcggtcggcttgacaccatgatggcttccctgttatgttgtcatgaggcatgtggcacaagtgtcatcgtaggggtacctcctgattcccaaaacctctcaatgaaccctatgctgctactgactggacgtacctggaagggagctattcttggtggctttaaaagtaaagaatgtgtcccaaaacttgtggctgattttatggctaagaagttttcattggatgcattaataacccatgttttaccttttgaaaaaataaatgaaggatttgacctgcttcactctgggaaaagtatccgtaccattctgatgttttgagacaatacagatgttttcccttgtggcagtcttcagcctcctctaccctacatgatctggagcaacagctgggaaatatcattaattctgctcatcacagattttatcaataaattacatttgggggctttccaaagaaatggaaattgatgtaaaattatttttcaagcaaatgtttaaaatccaaatgagaactaaataaagtgttgaacatcagctggggaattgaagccaataaaccttccttctt

SEQ ID NO: 537 - DNA, 914 bp, Homo sapiens; identical to SEQ ID NO: 215

SEQ ID NO: 538 - DNA, 565 bp, Homo sapiens
aattcgctcggctttgacagagtgcaagacgatgacttgcaaaatgtcgcagctggaacgcaacatagagaccatcatcaacaccttccaccaatactctgtgaagctggggcacccagacaccctgaaccagggggaattcaaagagctggtgcgaaaagatctgcaaaattttctcaagaaggagaataagaatgaaaaggtcatagaacacatcatggaggacctggacacaaatgcagacaagcagctgagcttcgaggagttcatcatgctgatggcgaggctaacctgggcctcccacgagaagatgcacgagggtgacgagggccctggccaccaccataagccaggcctcggggagggcaccccctaagaccacagtggccaagatcacagtggccacggccatggccacagtcatggtggccacggccacaggccactaatcaggaggccaggccaccctgcctctacccaaccagggccccggggcctgttatgtcaaactgtcttggctgtggggctaggggctggggccaaataaagtctcttcctccaagct

SEQ ID NO: 539 - DNA, 2102 bp, Homo sapiens
ccgctgggcgtagctgcgactcggcggagtcccggcggcgcgtccttgttctaacccggcgcgccatgaccgtcgcgcggccgagcgtgcccgcggcgctgcccctcctcggggagctgccccggctgctgctgctggtgctgttgtgcctgccggccgtgtggggtgactgtggccttcccccagatgtacctaatgcccagccagctttggaaggccgtacaagttttcccgaggatactgtaataacgtacaaatgtgaagaaagctttgtgaaaattcctggcgagaaggactcagtgatctgccttaagggcagtcaatggtcagatattgaagagttctgcaatcgtagctgcgaggtgccaacaaggctaaattctgcatccctcaaacagccttatatcactcagaattattttccagtcggtactgttgtggaatatgagtgccgtccaggttacagaagagaaccttctctatcaccaaaactaacttgccttcagaatttaaaatggtccacagcagtcgaattttgtaaaaagaaatcatgccctaatccgggagaaatacgaaatggtcagattgatgtaccaggtggcatattatttggtgcaaccatctccttctcatgtaacacagggtacaaattatttggctcgacttctagtttttgtcttatttcaggcagctctgtccagtggagtgacccgttgccagagtgcagagaaatttattgtccagcaccaccacaaattgacaatggaataattcaaggggaacgtgaccattatggatatagacagtctgtaacgtatgcatgtaataaaggattcaccatgattggagagcactctatttattgtactgtgaataatgatgaaggagagtggagtggcccaccacctgaatgcagaggaaaatctctaacttccaaggtcccaccaacagttcagaaacctaccacagtaaatgttccaactacagaagtctcaccaacttctcagaaaaccaccacaaaaaccaccacaccaaatgctcaagcaacacggagtacacctgtttccaggacaaccaagcattttcatgaaacaaccccaaataaaggaagtggaaccacttcaggtactacccgtcttctatctgggcacacgtgtttcacgttgacaggtttgcttgggacgctagtaaccatgggcttgctgacttagccaaagaagagttaagaagaaaatacacacaagtatacagactgttcctagtttcttagacttatctgcatattggataaaataaatgcaattgtgctcttcatttaggatgctttcattgtctttaagatgtgttaggaatgtcaacagagcaaggagaaaaaaggcagtcctggaatcacattcttagcacacctacacctcttgaaaatagaacaacttgcagaattgagagtgattcctttcctaaaagtgtaagaaagcatagagatttgttcgtatttagaatgggatcacgaggaaaagagaaggaaagtgatttttttccacaagatctgtaatgttatttccacttataaaggaaataaaaaatgaaaaacattatttggatatcaaaagcaaataaaaacccaattcagtctcttctaagcaaaattgctaaagagagatgaaccacattataaagtaatctttggctgtaaggcattttcatctttccttcgggttggcaaaatattttaaaggtaaaacatgctggtgaaccaggggtgttgatggtgataagggaggaatatagaatgaaagactgaatcttcctttgttgcacaaatagagtttggaaaaagcctgtgaaaggtgtcttctttgacttaatgtctttaaaagtatccagagatactacaatattaacataagaaaagattatatattatttctgaatcgagatgtccatagtcaaatttgtaaatcttattcttttgtaatatttatttatatttatttatgacagtgaacattctgattttacatgtaaaacaagaaaagttgaagaagatatgtgaagaaaaatgtatttttcctaaatagaaataaatgatcccattttttggt

SEQ ID NO: 540 - DNA, 915 bp, Homo sapiens
atgtggtcgacgagaagccccaacagcacggcgtggcctctcagcctcgagcctgatccggggatggcctctgcctccaccacaatgcatactaccaccattgcagagcctgatccagggatgtctggatggccggatggcagaatggagacctccacccccaccataatggacattgtcgtcattgcaggtgtgattgctgctgtggccatcgtcctagtctccctcctcttcgtcatgctgcgctacatgtaccggcacaagggcacgtaccacaccaatgaggccaagggcacggagtttgctgagagtgcagatgcagccctgcagggagaccctgccctccaagatgctggtgatagcagcagaaaggagtactttatttgagggacaacagacttcacttccctgaatgcctcccccatctccatcaggaaaaatacaccccatcgcccagtatccccgtcgataccaccagacagagagagagagtacacttgatttcttcccgagatagttacctagaaacactaggtgcctgcccaaggaggaacggaggaggactcgcgctacaagaggccactcccagggacccagggaggcgatggccaccccagaggccaccttttgctccacggaggtgggagagaatctgggcacatggggccccctagggcagtgcaggacaacatcagctcactggcaggaaagtccttgttgagggtgagggggtgctggggtacccgggggctggggaagcaaggaaataagtcatctgtatgctgactggggataatggcatcaatgtcagtccttgactttggggggaacagcaggtgccagagctaaaaggtacctttgtctgccattgatccagctaagaacgattggaaataaattggaaatgtaaccgag

SEQ ID NO: 541 - DNA, 3285 bp, Homo sapiens
cggctcgctggtaccggcagtgccatggcggccttcagcaagtacttgacggcgcgaaactcctcgctggctggtgccgcgttcctgctgctctgcctgctccacaagcggcgccgcgccctcggcctgcacggtaagaaaagtggaaaaccaccattacagaataatgagaaagaaggaaaaaaagaacgagctgtggtggacaaagtgtttttctcaaggctcatacagatcctgaaaatcatggtccctagaacattttgtaaagagacaggttacttggtacttattgctgttatgctggtgtctcgaacatattgtgatgtttggatgattcaaaatgggacactaattgaaagtggtatcattggtcgtagcaggaaagatttcaagagatacttactcaacttcatcgctgccatgcctcttatctctctggttaataacttcttgaagtatgggttaaatgagcttaaactgtgcttccgagtaaggctcactaaatacctctatgaggagtatcttcaagccttcacatattataaaaaggggaatctggacaacagaatagctaatccagaccagctgcttacacaagatgtagaaaaattttgtaacagtgtagtcgatctgtattcaaatcttagtaagccatttttagacatagttttgtatatctttaagttaacgagtgcaattggagctcagggcccagcgagcatgatggcctacttggttgtttctgggctattcctaactcgacttcgaagacccattggtaagatgacaataactgagcaaaagtatgaaggagaatatagatatgttaattctcggctcatcacaaacagtgaagaaattgccttttacaatgggaataaaagagaaaagcagacagtccactcagtcttccgaaaactggtggaacacctacataatttcattttgtttcggttttcaatgggcttcattgatagtattattgccaaataccttgccactgttgttggttacctagttgtcagtcgccctttcttagatttgtctcatcctcgacatctcaagagtacacattcggaacttctagaggattactaccaaagtggaagaatgcttttgcgaatgtctcaagctctgggtcgaatagttttggctgggcgtgaaatgactagattggccggttttactgctcggattacagaattaatgcaagtactgaaggatttaaatcatggcaaatatgagcgcacaatggtctcacaacaggaaaagggtattgaaggagtacaagtcattcccttgatacctggtgctggagaaatcattattgcagataacattataaagtttgatcatgttcctttagcaacgccaaatggagatgttttgatccgagaccttaattttgaagttcgatctggggctaatgttctaatttgtggtccaaatggctgcggaaagagttcacttttccgtgttcttggtgaattatggcctctttttggaggacgtctaactaaacctgaaagaagaaaattattttatgttcctcagagaccttacatgacccttggaacacttcgagatcaagtgatatatccagatggacgagaagatcagaaaaggaagggaatttctgacctagtacagaaggaatacttagacaatgtccagttgggtcatatccttgaacgtgaaggaggctgggacagtgttcaggattggatggacgtactcagtggtggagaaaagcaaagaatggcgatggcaagattattttatcataaaccccagtttgccattttggatgaatgcacaagtgcagttagtgtcgacgtggaaggctacatttatagtcattgtcgaaaggttggcatcactctcttcactgtgtctcataggaaatctctttggaaacatcatgagtactacctgcatatggatggcagaggcaactatgaattcaaacagataacagaagatacagttgagtttggctcttagagaaatctggagaactatacctgcttcagtgaaataattacagaatatacttagaaaggcaaagtacattgtaaaataaagttgagcttagttttttttaaaaaaaaaaacaaagccaaccaaattatattagatacagaataatggagaacaagttgttaaaacatttaatattatataggatattgctaattgtgtatatgttggtttaattaataatatgtactaagaatgtccttattcttgtggttaaaaacctgcctaaattaaattgggcttcaatcatgtaacctgattcatcctgggatgtaaaccattcgaagtcagctaattggacttttatggctctatcttttccttcatgaagaaccctatttaaaactgggtcatcatttgtcctgttctagcaagatagtcttcagtttcatttcctgtgccctgtggtagttggaaaccatatcataatgtattatttaaatgtttaacatcattgcataacacgtttattatacagtggcagatttctttagctgccacagtaatactcattccttgtgtgtgtcttggagtgcatttgactccaggaaaagccattttggttttccttaactaaatgataaatgtacccctctcagtctgcagtattgagttgtttaaagtatatgtgcagtcttgcttacaaggaggggttaccatgtatcacacctaatcttcccaatgtttgggaatattaaaacaccaacagtccttaacatgccaggctcaaggtcttataagagttctagatttttaagagaattagacaaatttgtgtgtgttagaagcccattcattagaagtgtggtggttatttggtattaaactcaaacagtgccaagcttgggaaggcactacaatgaaataatgcactgagtatgcaatgctatcactgtctttgactgtgattttatgtttaaaaagtatgttctaaaattattatatatacatgggtgaattatgtttccgaggcactgttttatctctgtgaatcttgaataacttttttatatttgggttatgatgtcaaacgatcctaagcgaagatgatttcagttcatcaaatcatcattaatgactttatgtattatttgcacagggagaattgaaactgagtataatcaataagctagatacgaaatcagtttctcaaactgagcttcagaaaggggcattttgtactcttgtttttgcataactggttttgtttttttgcagaattaactataacaatcactggctacg

SEQ ID NO: 542 - DNA, 2242 bp, Homo sapiens
ccgggataaaacgaggtgcggagagcgggctggggcatttctccccgagatggcgggtctgacggcggcggccccgcggcccggagtcctcctgctcctgctgtccatcctccacccctctcggcctggaggggtccctggggccattcctggtggagttcctggaggagtcttttatccaggggctggtctcggagcccttggaggaggagcgctggggcctggaggcaaacctcttaagccagttcccggagggcttgcgggtgctggccttggggcagggctcggcgccttccccgcagttacctttccgggggctctggtgcctggtggagtggctgacgctgctgcagcctataaagctgctaaggctggcgctgggcttggtggtgtcccaggagttggtggcttaggagtgtctgcaggtgcggtggttcctcagcctggagccggagtgaagcctgggaaagtgccgggtgtggggctgccaggtgtatacccaggtggcgtgctcccaggagctcggttccccggtgtgggggtgctccctggagttcccactggagcaggagttaagcccaaggctccaggtgtaggtggagcttttgctggaatcccaggagttggaccctttgggggaccgcaacctggagtcccactggggtatcccatcaaggcccccaagctgcctggtggctatggactgccctacaccacagggaaactgccctatggctatgggcccggaggagtggctggtgcagcgggcaaggctggttacccaacagggacaggggttggcccccaggcagcagcagcagcggcagctaaagcagcagcaaagttcggtgctggagcagccggagtcctccctggtgttggaggggctggtgttcctggcgtgcctggggcaattcctggaattggaggcatcgcaggcgttgggactccagctgcagctgcagctgcagcagcagccgctaaggcagccaagtatggagctgctgcaggcttagtgcctggtgggccaggctttggcccgggagtagttggtgtcccaggagctggcgttccaggtgttggtgtcccaggagctgggattccagttgtcccaggtgctgggatcccaggtgctgcggttccaggggttgtgtcaccagaagcagctgctaaggcagctgcaaaggcagccaaatacggggccaggcccggagtcggagttggaggcattcctacttacggggttggagctgggggctttcccggctttggtgtcggagtcggaggtatccctggagtcgcaggtgtccctagtgtcggaggtgttcccggagtcggaggtgtcccgggagttggcatttcccccgaagctcaggcagcagctgccgccaaggctgccaagtacggagtggggaccccagcagctgcagctgctaaagcagccgccaaagccgcccagtttgctcttctcaatcttgcagggttagttcctggtgtcggcgtggctcctggagttggcgtggctcctggtgtcggtgtggctcctggagttggcttggctcctggagttggcgtggctcctggagttggtgtggctcctggcgttggcgtggctcccggcattggccctggtggagttgcagctgcagcaaaatccgctgccaaggtggctgccaaagcccagctccgagctgcagctgggcttggtgctggcatccctggacttggagttggtgtcggcgtccctggacttggagttggtgctggtgttcctggacttggagttggtgctggtgttcctggcttcggggcagtacctggagccctggctgccgctaaagcagccaaatatggagcagcagtgcctggggtccttggagggctcggggctctcggtggagtaggcatcccaggcggtgtggtgggagccggacccgccgccgccgctgccgcagccaaagctgctgccaaagccgcccagtttggcctagtgggagccgctgggctcggaggactcggagtcggagggcttggagttccaggtgttgggggccttggaggtatacctccagctgcagccgctaaagcagctaaatacggtgctgctggccttggaggtgtcctagggggtgccgggcagttcccacttggaggagtggcagcaagacctggcttcggattgtctcccattttcccaggtggggcctgcctggggaaagcttgtggccggaagagaaaatga

SEQ ID NO: 543 - DNA, 8447 bp, Homo sapiens
acctctgcctcctggttccaagcaatcctccttcctcaccctccagagtagctgggattacacgcgcctgccaccgcgcctggcctaatttttgtatttttagtagagatgggggtttccaaccatgttggccaggctggtctccaaactcctgacctcaggtgatcctgcccacctaagcctcccaaaatgctggtattacaggcatgagccaccgtgcccggcctaaataattaataaaataatggacgatgggtgccttctactgagctcccggtaattgtgagtgagtagaggacttgccctggggacattcagtgacctgctgggtgttgctgagctgtgaggaagttcaggtctggctgcagtggtgaggctgtgactcaatcaatcactgctgatgctcccaggacctgcaccagcttagtcctaggggcaaggattttaactgtccacctcagtttcttcatttgtaagatgcaaataacagtcacccctgcctcatgggatggagctgtgtaatgcccgcaacagtgcctgctgcatagaggggttgctgccagctgcctctccctccttgtctcttacctgcctgctgcctgggtcaggatgaagaggggcccttgtgttgcccccaccctggctgcctgctaagggcccatgtgatctgcctggcagaggagtttcttcaggaagaaccagggcagcttctgcccctagagggccaatgcccttggtgagtgcagtcccctggccccagcctggtccacctctgggaagagggtgcccagttgtgcaatccaggcccaggcagctgagccctcatctcagcatgcagggcggatactggagggggcttgtggcatctgactctgtatctcctacctgcccctctccttggtagctgtgagaagtcactgctttggggagacctgatctggctgtgccagatggacactgagaaagaagtagaagactcagaattagaagaggtgagtgggctttggtggcgggctccctaccccactccctgccctgggctgcctgtgaccacactgcttgcctctgcaggcacactggacagacctgctggagacctgatcctcagtgtccttaccccctcctacctcttttctgtgccacctgctgtgggtccagcaggtttttacttgagtacaataaaaagtctgagtcaagggtgccttatggtggatgctgaggggaggggcggagctagtagcccaaggtcctgccagtcacggggcttcctcaggggcacagaggaggcaggaggggcccctggccctagcacgtgaacagcttctactctgcctggaaaccccatgcctcagctttcccctacttgcctctgagctcatgcaattcttggaagcctgggagacttaccttgaaattgaatgcaaataggacaaagaccaaggaggatggggggatgccctccttccacggggccctgtggcttccaagtcttaatctcctctagtctcttgtctacggagcctccttcaaacccagggaaagaaaagcacctgccagggttgtttttcttctaggatcttctattgatgctctgtgaggtcccccaggagccatgaagctagggctggctcctagggcaatgggactacagtgtccttgtcctttcttattctttctgttctttctttctttcttttttttttttttttttttttttgagacagagtctcactctgttgcccaggctggagtgcagtggtgtgatcttggctcactgaaacctccgcctcctgggttcaagtgattctcttgcctcagcctcctgagtagctaggattacaggtgcccgccatcatgcccagctaatttttgtatttttagtagagacagggtttcaccatgttggccagcttggtctcgaactcctgacctcaggtgatcctgctgcatcgacctcccaaagtactgggattacaggcgtgagccaccacgctcagcctctttcttgttctatatgtccatgctctgctccacttctgccccttcactctgccccacacatcactccagactggccttgtggtcagagcctggaatgcctgggctgctgggggcctgtggactgcactgggccagaacccctgccgccttcaagactggcctgtagccagcaggtaggtgacttttcccaggccggcctatcccacctttcccctccactcactcacctcccttgcctgggtcaattagagaaagcttgtcggccaggcatggtggctcatgcctgtaatctcagcactttgggaggccgaggcgggcggatcatctgagctcaggagtttgagaccagcctggccaacatggcaaaaccccgtctctactaaaaatacaaaaattaaccggatgtggtggtgtgcacctgtaatcccagctactcgggaggctgaggcagaagaatcgcttgaacccaggagggggaggttacagtgagcggagatcgtgctactgcattgcagcctgggcgagagagcgagtctccatctcacataaaaaaaagaaaaagaaagaaagcaagcttgtctgttggcctgccctgcagggtggagttcagagggaaggtcaggagcctagtgacagctcaaaaaaaaaaaaacccaaataccaatgttggccccttttgcctttcattcatgtgttttctatacactaaactcacatattgggtttgcagatcactccaagcttggctggagctgtggtggtaaggagggtaatagagaagcttccccaccctcaaccccaccccttccttcctggagttcccagccctgactttagatccctcccacactggaccttcaaaaccctcagggcagagagcagccctacactccctacaccacacccatactcagcccctgcaggcaaggagagaacaggtcaggttcccgagagctcaggtgagtgacacgttggaatggcccagggcaccttcaccctgctcagcttgtggctccaacattctagaagccgaggcctctgccatccctgccctttcccatggatattccatttcaattagacaacccagcctggccggaatccccctgcgttccttcttttcctttgtgtatttttgagacagggtgttgctccgtcacccaggctggagtgtagtgggatcctggcccactgcagcctcaaattcctaggctgaggcaatcctgccgcctcagcctcctgagtagctggggttacaagagcaagccaccacacccagctaattttgaaaaatattttttgtagaggagaggtcttgctttgttgtccaggttggtctcaaactccagggctcaagggatcctttcccgttggcctcccaaggctctgggattacaggcgggagtcaccctgcctgggcccctccttttgatgagtcatcagttttcattcccgcacgaggctctagcccctggtaccagcttagttgctcaatgggctgtgtttgttctggagcccagatggactgtggccaggcaagtggatcacagacctggccggcctgggaggtttccacatgtgaggggcatgaggggggctcaaggaggggagcatcggggagaggagcgcactgggtggaggctgggggtcccagcaggaaatggtgagacaaagggcgctggctggcagggagacagcacaggcaggccctagagcttcctcagcacagctggactctcctggagaccttcacacaccctgatatctgggccccgcgctacgagggtgctttcactggtctgcactatgccccaggccctgggattttgaacagctctgcaggtgactgaaaggtgcggccaggctggggaacgacctggtttcagccccagccccgccactgactgactttgtgagtgcgggcaagtcactcagcctccctaggcctcagtgacttccctgaaagcaaaaactctgcaaaggggcagctgggtgctggctcacacctgtaatcccagcactttgggaggctgaggtagacaaatcacttgaggccaggagttctagaccagcctggccaacatggtgaaaccccatctctactaaagaaaaaaaaaaattagctgagcatggttgtacatgcttgtaatcccagctacttgggatgccgaggcgggaggattgcttgaacccaagaggtggagtttgcagtgagctgagattgtgccacactgcactccagcttgggtgagagtgagactccatctcaaaaaaaaaaaaaaaaagagagaatcccactttcttgctgttgtgatggtggtaagggaacgggcctggctctggcccctgatgcaggaacatggagctgatccaggacacctcccgcccgccactggagtacgtgaagggggtcccgctcatcaagtactttgcagaggcactggggcccctgcagagcttccaagcccgacctgatgacctgctcatcaacacctaccccaagtctggtaagtgaggagggccacccaccctctcccaggcggcagtccccaccttggtcagcaaggtcgtgccctcagcctgctcacctcctatctccctccctctccaggcaccacctgggtgagccagatactggacatgatctaccagggcggcgacctagagaagtgtaaccgggctcccatctacgtacgggtgcccttccttgaggtcaatgatccaggggaaccctcaggtgcatggctgggtcctgggggtaagggaagtggaggaagacagggctggggcttcagctcaccagaccttccctgacccactactcagggctggagactctgaaagacacaccgcccccacggctcatcaagtcacacctgcccctggctctgctccctcagactctgttggatcagaaggtcaaggtgaggccggcctcaatggttcacacctgtcatcccagtttgagactgaggagggaggatcccttgaaggcgagagatggagaccagcctgggcaacattgctgtagagatgacatcccatctctacaaaaataaaattaacaacctggtatggtggcatagactgttcccagttacttaggaggctcagcggggaggactgtttatgcaaataggaagctgcaatgagccctgatgatcctgctgctgcactccagcctgggcaacacagcaaaaccatctctacgaaaaaaaaagttcccactgactggcaaggaaagccaggaaggggggctcaggtgccctctcagccatgtacctgttcttctggaagggcctcctcgcttctgccaggctcatcacatcttttttttttttgagacagagtcttgctctgtcaccctggctggagtgcagtggcatgatctcagctcactgcaacctccgcctccccagttcaagtgattctcctgcctcagcctcctgagtagctgggattacaggcgtgtgctaccacacccggctaatttttgtattctttttagtagagacggggtttcaccatgttggtcaagtggatctcaaactcttgaccttgtgatcctcctgcctcgacctcacaaagtgctggaattacaggcgtgagccaccgcgcctggccctttttttttttgagacagtttcactcttgttgccgaggctagagcgcaatcgtgtgatctcggttcactgcaaccaccgcctcctgggttcaagcaattctcctgcttcagcctcccaaggagctgggattacaggtacctgccaccacgcccggctaattttgtatttttagtagagatggggtttcaccatgttggtcaggctggtcttgaactcctgacctcaggtgatctggcaccttggcctcccaaagtgccgggattagaggcatgagccaccacgcccagccttcatcacatcttgagagaggacactgtctgcctcttgctctgatgagggtctgatgcaaaggatagtgagtctctacagtgcacacttaagaaaggcagcatgtgggtgctcacaggtcaggcggaggagggggagctggtggggaccaggcatgccttgctccagatcaggatatgatggcattggtgcagattatattagtatagaatatggtctcaggaaccaggcaggactttggcttccgagcagggttcagatcccagcttggccctacctgtgcagtgagatctcaagcaagtcagcctctaagcctcaggttcctcctttgccagttcaacagatgagctggcctggggtgggctgtgtggtgatggtgctggggctgggtcctctgcccctgcaggtggtctatgttgcccgaaacccaaaggacgtggcggtctcctactaccatttccaccgtatggaaaaggcgcaccctgagcctgggacctgggacagcttcctggaaaagttcatggctggagaaggtgggcttgactggaggaaggagggtgtgaagccgaggggtggtggctataacgtacagcaaccctgtgtcggtgccccctgcccgcttctctagtgtcctacgggtcctggtaccagcacgtgcaggagtggtgggagctgagccgcacccaccctgttctctacctcttctatgaagacatgaaggaggtgagaccgactgtgatgcttccccccatgtgacacctgggggcaggcacctcacagggacccaccaaggccacccagccccgtccctgggcggctcccacagcaagcccggattccccatcctacctccctggcccaggcccccccactgcagccccacctggcagcaggctcggcacagctttcatcttctgcacctgagtcagctgcatgggtggccacggatcagatacttagtcctattgcttatcctcaccaaagggtgtgccacccagggccacagtcatggaagaagaccatcccggtcctcacccataggcgccaagccctgttcatgatgggatcacagggcagagatcaattcattttactccagagactagggccccaggggttgaggctctttggggtttctaggggaagtggccagatcccctctgaggttagagagggggacccgttttgttttgctccactgaggagccctctgctgctcagaaccccaaaagggagattcaaaagatcctggagtttgtggggcgctccctgccagaggagaccatggacttcatggttcagcacacgtcgttcaaggagatgaagaagaaccctatgaccaactacaccaccgtcccccaggagctcatggaccacagcatctcccccttcatgaggaaaggtgggtgctggccagcacgggggtttggggcgggtgggagcagcagctgcagcctccccataggcacttggggcctcccctgggatgagactccagctttgctccctgccttcctcccccaggcatggctggggactggaagaccaccttcaccgtggcgcagaatgagcgcttcgatgcggactatgcggagaagatggcaggctgcagcctcagcttccgctctgagctgtgagaggggctcctggagtcactgcagagggagtgtgcgaatctaccctgaccaatgggctcaagaataaagtatgatttttgagtcaggcacagtggctcatgtctgcaatcccagcgatttgggaggttgagctggtaggatcacaataggccacgaatttgagaccagcctggtaaaatagtgagacctcatctctacaaagatgtaaaaaaattagccacatgtgctggcacttacctgtagtcccagctacttgggaagcagaggctggaggatcatttcagcccaggaggttgtggatacagtgagttatgacatgcccattcactacagcctggatgacaagcaagaccctccctccaaagaaaataaagctcaattaaaataaaatatgatttgtgttcatgtagagcctgtattggaaaggaagagaaactctgagctgaaagagtgaatgcccggtggggccacatatggtcacctctcccccagccttcagctccccaggtcaccatatctggggaggggagaagggtttggagaagtaaaacccaggagatgtgtggaggggggatgtctgtttaatcccagcacatcctctgctgtcctgccccaagatggtggaggacgtcgagtccgccgggcagcgtcactttttcttgggctccttagaagctaccaggtacctctgggccacactgagatgaggggagtagccgcctgcataggaggtgtcttcaaacaggatagtatagtccctcctgggggttgtgggggtaggtggccaaggaagggtagaggagcaagcccccggggctggttgtcaactcactttgttggctggaattggttgtaacttgaccacctcgggcaggatcccactgctcatccccaa

SEQ ID NO: 544 - DNA, 4003 bp, Homo sapiens
attaaacctctcgccgagcccctccgcagactctgcgccggaaagtttcatttgctgtatgccatcctcgagagctgtctaggttaacgttcgcactctgtgtatataacctcgacagtcttggcacctaacgtgctgtgcgtagctgctcctttggttgaatccccaggcccttgttggggcacaaggtggcaggatgtctcagtggtacgaacttcagcagcttgactcaaaattcctggagcaggttcaccagctttatgatgacagttttcccatggaaatcagacagtacctggcacagtggttagaaaagcaagactgggagcacgctgccaatgatgtttcatttgccaccatccgttttcatgacctcctgtcacagctggatgatcaatatagtcgcttttctttggagaataacttcttgctacagcataacataaggaaaagcaagcgtaatcttcaggataattttcaggaagacccaatccagatgtctatgatcatttacagctgtctgaaggaagaaaggaaaattctggaaaacgcccagagatttaatcaggctcagtcggggaatattcagagcacagtgatgttagacaaacagaaagagcttgacagtaaagtcagaaatgtgaaggacaaggttatgtgtatagagcatgaaatcaagagcctggaagatttacaagatgaatatgacttcaaatgcaaaaccttgcagaacagagaacacgagaccaatggtgtggcaaagagtgatcagaaacaagaacagctgttactcaagaagatgtatttaatgcttgacaataagagaaaggaagtagttcacaaaataatagagttgctgaatgtcactgaacttacccagaatgccctgattaatgatgaactagtggagtggaagcggagacagcagagcgcctgtattggggggccgcccaatgcttgcttggatcagctgcagaactggttcactatagttgcggagagtctgcagcaagttcggcagcagcttaaaaagttggaggaattggaacagaaatacacctacgaacatgaccctatcacaaaaaacaaacaagtgttatgggaccgcaccttcagtcttttccagcagctcattcagagctcgtttgtggtggaaagacagccctgcatgccaacgcaccctcagaggccgctggtcttgaagacaggggtccagttcactgtgaagttgagactgttggtgaaattgcaagagctgaattataatttgaaagtcaaagtcttatttgataaagatgtgaatgagagaaatacagtaaaaggatttaggaagttcaacattttgggcacgcacacaaaagtgatgaacatggaggagtccaccaatggcagtctggcggctgaatttcggcacctgcaattgaaagaacagaaaaatgctggcaccagaacgaatgagggtcctctcatcgttactgaagagcttcactcccttagttttgaaacccaattgtgccagcctggtttggtaattgacctcgagacgacctctctgcccgttgtggtgatctccaacgtcagccagctcccgagcggttgggcctccatcctttggtacaacatgctggtggcggaacccaggaatctgtccttcttcctgactccaccatgtgcacgatgggctcagctttcagaagtgctgagttggcagttttcttctgtcaccaaaagaggtctcaatgtggaccagctgaacatgttgggagagaagcttcttggtcctaacgccagccccgatggtctcattccgtggacgaggttttgtaaggaaaatataaatgataaaaattttcccttctggctttggattgaaagcatcctagaactcattaaaaaacacctgctccctctctggaatgatgggtgcatcatgggcttcatcagcaaggagcgagagcgtgccctgttgaaggaccagcagccggggaccttcctgctgcggttcagtgagagctcccgggaaggggccatcacattcacatgggtggagcggtcccagaacggaggcgaacctgacttccatgcggttgaaccctacacgaagaaagaactttctgctgttactttccctgacatcattcgcaattacaaagtcatggctgctgagaatattcctgagaatcccctgaagtatctgtatccaaatattgacaaagaccatgcctttggaaagtattactccaggccaaaggaagcaccagagccaatggaacttgatggccctaaaggaactggatatatcaagactgagttgatttctgtgtctgaagttcacccttctagacttcagaccacagacaacctgctccccatgtctcctgaggagtttgacgaggtgtctcggatagtgggctctgtagaattcgacagtatgatgaacacagtatagagcatgaatttttttcatcttctctggcgacagttttccttctcatctgtgattccctcctgctactctgttccttcacatcctgtgtttctagggaaatgaaagaaaggccagcaaattcgctgcaacctgttgatagcaagtgaatttttctctaactcagaaacatcagttactctgaagggcatcatgcatcttactgaaggtaaaattgaaaggcattctctgaagagtgggtttcacaagtgaaaaacatccagatacacccaaagtatcaggacgagaatgagggtcctttgggaaaggagaagttaagcaacatctagcaaatgttatgcataaagtcagtgcccaactgttataggttgttggataaatcagtggttatttagggaactgcttgacgtaggaacggtaaatttctgtgggagaattcttacatgttttctttgctttaagtgtaactggcagttttccattggtttacctgtgaaatagttcaaagccaagtttatatacaattatatcagtcctctttcaaaggtagccatcatggatctggtagggggaaaatgtgtattttattacatctttcacattggctatttaaagacaaagacaaattctgtttcttgagaagagaatattagctttactgtttgttatggcttaatgacactagctaatatcaatagaaggatgtacatttccaaattcacaagttgtgtttgatatccaaagctgaatacattctgctttcatcttggtcacatacaattatttttacagttctcccaagggagttaggctattcacaaccactcattcaaaagttgaaattaaccatagatgtagataaactcagaaatttaattcatgtttcttaaatgggctactttgtcctttttgttattagggtggtatttagtctattagccacaaaattgggaaaggagtagaaaaagcagtaactgacaacttgaataatacaccagagataatatgagaatcagatcatttcaaaactcatttcctatgtaactgcattgagaactgcatatgtttcgctgatatatgtgtttttcacatttgcgaatggttccattctctctcctgtactttttccagacacttttttgagtggatgatgtttcgtgaagtatactgtatttttacctttttccttccttatcactgacacaaaaagtagattaagagatgggtttgacaaggttcttcccttttacatactgctgtctatgtggctgtatcttgtttttccactactgctaccacaactatattatcatgcaaatgctgtattcttctttggtggagataaagatttcttgagttttgttttaaaattaaagctaaagtatctgtattgcattaaatataatatcgacacagtgctttccgtggcactgcatacaatctgaggcctcctctctcagtttttatatagatggcgagaacctaagtttcagttgattttacaattgaaatgactaaaaaacaaagaagacaacattaaaaacaatattgtttcta

SEQ ID NO: 545 - DNA, 412 bp, Homo sapiens; identical to SEQ ID NO: 3
  misc_feature: n=a,t,g or c

SEQ ID NO: 546 - DNA, 360 bp, Homo sapiens
  misc_feature: n=a,t,g or c
cttggaggagctctgttggtgagaggtcgccctgcctcactggcacccctgggggcactagctggaagagaggcctggccatgctcctctcagggcaggcacatgtacggggcatacaaggcacagcgcctgttggaacaggtggctgtgttcctgctcctggcccccgtgcggctgggcctccgcccctgcaccagtcacatgcactggacgagggccgaaactcctgtctgctatcgagccctggtgctatgtggccccggagccacagcacaaatcatcttnagtggcgaacnnaaccnactttgattctattttttttttaacacattaaaatctgtttttaaagataaaaaaana

SEQ ID NO: 547 - DNA, 397 bp, Homo sapiens
  misc_feature: n=a,t,g or c
tttgcagtgagctgacgtgacaccactgcactccagcctgggtgacagagcaagactccatctcaaaaaacaaaaacaaaaaaaacagatagagggaggatggtcatgtctgtgtcatttccaaggtcttactgctttggggttcattttcacctcatttagttcgtgcgagacagcgatgatttttgctgttttatgaaggaggagtttgtggcttgagttgctgggagttggccagtgtggcgagctcttgtggccatgccagccggngcaaggagttgagccctcgaccacccgctgcccggtccccactctgggtccagggacagcactgaaatccacacctttgacctgtgtcactggaagcacctgtcccagatacattcactttgacttg

SEQ ID NO: 548 - DNA, 472 bp, Homo sapiens
gacgcgcggggccacactgccgccccctagactggcgctgggactgtgggacaagttggctgggtccgggcttggggactgcaaccggtcttctgtgcttcaccatctacataatgaatcccagtatgaagcagaaacaagaagaaatcaaagagaatataaagaatagttctgtcccaagaagaactctgaagatgattcagccttctgcatctggatctcttgttggaagagaaaatgagctgtccgcaggcttgtccaaaaggaaacatcggaatgaccacttaacatctacaacttccagccctggggttattgtcccagaatctagtgaaaataaaaatcttggaggagtcacccaggagtcatttgatcttatgattaaagaaaatccatcctctcagtattggaaggaagtggcagaaaaacggagaaaggcgctgtatgaagcacttaaggaaaatgagaaact

SEQ ID NO: 549 - DNA, 142 bp, Homo sapiens; identical to SEQ ID NO: 22

SEQ ID NO: 550 - DNA, 503 bp, Homo sapiens
aattcggcactaggtgagtcatcgagaagtcctggatcttttgtggttacaccagcatcatgtggcaagcagaggcgacttccggaagagacaggcaggcaccgtgagacaggtggctgtgctctcccaggtgtctcagagacagatgccttatttaaaatcagcacgacatgtgtgagatcttctgtttcctaccccaaatcctgaaaccctgcagacactggctgactggtagaggtggggtctgtaagttgtcccctagtttgctaagaaaatctaaaataatatttattatatgagttaggagagagagaatgggtccgcgtggcctcctctgcagatgtactggtctgaaatgaggttctgagtcactggccaggccagatgtgctcatgtcggtgtctggtgtctggtttgtggagaaaacagtatggtgtgttttaagctatttgtgttctgttgtaatatacttttagaaggttaattggtaaggttaaggtagc

SEQ ID NO: 551 - DNA, 316 bp, Homo sapiens; identical to SEQ ID NO: 41
  misc_feature: n=a,t,g or c

SEQ ID NO: 552 - DNA, 2036 bp, Homo sapiens
gccatggggcgctgggcctgggtccccagcccctggcccccaccggggctgggccccttcctcctcctcctcctgctgctgctgctgctgccacgggggttccagccccagcctggcgggaaccgtacggagtccccagaacctaatgccacagcgacccctgcgatccccactatcctggtgacctctgtgacctctgagaccccagcaacaagtgctccagaggcagagggaccccaaagtggggggctcccgcccccgcccagggcagttccctcgagcagtagcccccaggcccaagcactcaccgaggacgggaggccctgcaggttccccttccgctacgggggccgcatgctgcatgcctgcacttcggagggcagtgcacacaggaagtggtgtgccacaactcacaactacgaccgggacagggcctggggctactgtgtggaggccaccccgcctccagggggcccagctgccctggatccctgtgcctccggcccctgcctcaatggaggctcctgctccaatacccaggacccccagtcctatcactgcagctgcccccgggccttcaccggcaaggactgcggcacagagaaatgctttgatgagacccgctacgagtacctggaggggggcgaccgctgggcccgcgtgcgccagggccacgtggaacagtgcgagtgcttcgggggccggacctggtgcgaaggcacccgacatacagcttgtctgagcagcccttgcctgaacgggggcacctgccacctgatcgtggccaccgggaccaccgtgtgtgcctgcccaccaggcttcgctggacggctctgcaacatcgagcctgatgagcgctgcttcttggggaacggcactgggtaccgtggcgtggccagcacctcagcctcgggcctcagctgcctggcctggaactccgatctgctctaccaggagctgcacgtggactccgtgggcgccgcggccctgctgggcctgggcccccatgcctactgccggaatccggacaatgacgagaggccctggtgctacgtggtgaaggacagcgcgctctcctgggagtactgccgcctggaggcctgcgaatccctcaccagagtccaactgtcaccggatctcctggcgaccctgcctgagccagcctccccggggcgccaggcctgcggcaggaggcacaagaagaggacgttcctgcggccacgtatcatcggcggctcctcctcgctgcccggctcgcacccctggctggccgccatctacatcggggacagcttctgcgccgggagcctggtccacacctgctgggtggtgtcggccgcccactgcttctcccacagcccccccagggacagcgtctccgtggtgctgggccagcacttcttcaaccgcacgacggacgtgacgcagaccttcggcatcgagaagtacatcccgtacaccctgtactcggtgttcaaccccagcgaccacgacctcgtcctgatccggctgaagaagaaaggggaccgctgtgccacacgctcgcagttcgtgcagcccatctgcctgcccgagcccggcagcaccttccccgcaggacacaagtgccagattgcgggctggggccacttggatgagaacgtgagcggctactccagctccctgcgggaggccctggtccccctggtcgccgaccacaagtgcagcagccctgaggtctacggcgccgacatcagccccaacatgctctgtgccggctacttcgactgcaagtccgacgcctgccagggggactcaggggggcccctggcctgcgagaagaacggcgtggcttacctctacggcatcatcagctggggtgacggctgcgggcggctccacaagccgggggtctacacccgcgtggccaactatgtggactggatcaacgaccggatacggcctcccaggcggcttgtggctccctcctgaccctccagcgggacaccctggttcccaccattccctgccttgctgacaataaagatatttccaag

SEQ ID NO: 553 - DNA, 493 bp, Homo sapiens
ctgaaaacgcaccatttgtatagatcatgaaaagttttaaggaaactcagagaaaaagagaacaacgcagcttaaaacttttaaaatgtcctccctcacccgtggctcaaacagccctgcatctgccgtggccggcacgtttctggttgaactgcctttatgttaaagttcagatactggtagtgtgcccatttcttaagctgtctatttttatttgttgagctggggtttggctggctccactccagatgtctctctcacaagatttggtgctgatgatctatttatagaactgtggttctgttgccatggtaacatgctggaggccagggcggctggggagctatttctggactcgtgctgtaatgtaagattgattgggcaagttagtatatcctctaagccagactaactctgtactagtaaaaaggagggggggacagaaaacttaggcagttctttgaataaacttttctctctttgatgattttct

SEQ ID NO: 554 - DNA, 3301 bp, Homo sapiens
  misc_feature: n=a,t,g or c
gaattctgcggagcctgcgggacggcggcgggttggcccgtaggcagccgggacagtgttgtacagtgttttgggcatgcacgtgatactcacacagtggcttctgctcaccaacagatgaagacagatgcaccaacgagggtctggaatggtctggagtggtctggaaagcagggtcagatacccctggaaaactgaagcccgtggagcaatgatctctacaggactgcttcaaggctgatgggaaccaccctgtagaggtccatctgcgttcagacccagacgatgccagagctatgactgggcctgcaggtgtggcgccgaggggagatcagccatggagcagccacaggaggaagcccctgaggtccgggaagaggaggagaaagaggaagtggcagaggcagaaggagccccagagctcaatgggggaccacagcatgcacttccttccagcagctacacagacctctcccggagctcctcgccaccctcactgctggaccaactgcagatgggctgtgacggggcctcatgcggcagcctcaacatggagtgccgggtgtgcggggacaaggcatcgggcttccactacggtgttcatgcatgtgaggggtgcaagggcttcttccgtcgtacgatccgcatgaagctggagtacgagaagtgtgagcgcagctgcaagattcagaagaagaaccgcaacaagtgccagtactgccgcttccagaagtgcctggcactgggcatgtcacacaacgctatccgttttggtcggatgccggaggctgagaagaggaagctggtggcagggctgactgcaaacgaggggagccagtacaacccacaggtggccgacctgaaggccttctccaagcacatctacaatgcctacctgaaaaacttcaacatgaccaaaaagaaggcccgcagcatcctcaccggcaaagccagccacacggcgccctttgtgatccacgacatcgagacattgtggcaggcagagaaggggctggtgtggaagcagttggtgaatggcctgcctccctacaaggagatcagcgtgcacgtcttctaccgctgccagtgcaccacagtggagaccgtgcgggagctcactgagttcgccaagagcatccccagcttcagcagcctcttcctcaacgaccaggttacccttctcaagtatggcgtgcacgaggccatcttcgccatgctggcctctatcgtcaacaaggacgggctgctggtagccaacggcagtggctttgtcacccgtgagttcctgcgcagcctccgcaaacccttcagtgatatcattgagcctaagtttgaatttgctgtcaagttcaacgccctggaacttgatgacagtgacctggccctattcattgcggccatcattctgtgtggagaccggccaggcctcatgaacgttccacgggtggaggctatccaggacaccatcctgcgtgccctcgaattccacctgcaggccaaccaccctgatgcccagtacctcttccccaagctgctgcagaagatggctgacctgcggcaactggtcaccgagcacgcccagatgatgcagcggatcaagaagaccgaaaccgagacctcgctgcaccctctgctccaggagatctacaaggacatgtactaacggcggcacccaggcctccctgcagactccaatggggccagcactggaggggcccacccacatgacttttccattgaccagctctcttcctgtctttgttgtctccctctttctcagttcctctttcttttctaattcctgttgctctgtttcttcctttctgtaggtttctctcttcccttctcccttctcccttgccctccctttctctctcctatccccacgtctgtcctcctttcttattctgtgagatgttttgtattatttcaccagcagcatagaacaggacctctgcttttgcacaccttttccccaggagcagaagagagtgggcctgccctctgccccatcattgcacctgcaggcttaggtcctcacttctgtctcctgtcttcagagcaaaagacttgagccatccaaagaaacactaagctctctgggcctgggttccagggaaggctaagcatggcctggactgactgcagccccctatagtcatggggtccctgctgcaaaggacagtggcagaccccggcagtagagccgagatgcctccccaagactgtcattgcccctccgatcgtgaggccacccactgacccaatgatcctctccagcagcacacctcagccccactgacacccagtgtccttccatcttcacactggtttgccaggccaatgttgctgatggcccctccagcacacacacataagcactgaaatcactttacctgcaggcaccatgcacctcccttccctccctgaggcaggtgagaacccagagagaggggcctgcaggtgagcaggcagggctgggccaggtctccggggaggcaggggtcctgcaggtcctggtgggtcagcccagcacctcgcccagtgggagcttcccgggataaactgagcctgttcattctgatgtccatttgtcccaatagctctactgccctccccttcccctttactcagcccagctggccacctagaagtctccctgcacagcctctagtgtccggggaccttgtgggaccagtcccacaccgctggtccctgccctcccctgctcccaggttgaggtgcgctcacctcagagcagggccaaagcacagctgggcatgccatgtctgagcggcgcagagccctccaggcctgcaggggcaaggggctggctggagtctcagagcacagaggtaggagaactggggttcaagcccaggcttcctgggtcctgcctggtcctccctcccaaggagccattctatgtgactctgggtggaagtgcccagcccctgcctgacggnnnnnnngatcactctctgctggcaggattcttcccgctccccacctacccagctgatgggggttggggtgcttctttcagccaaggctatgaagggacagctgctgggacccacctccccccttccccggccacatgccgcgtccctgcccccacccgggtctggtgctgaggatacagctcttctcagtgtctgaacaatctccaaaattgaaatgtatatttttgctaggagccccagcttcctgtgtttttaatataaatagtgtacacagactgacgaaactttaaataaatgggaattaaatatttaaaaaaaaaagcggccgcgaattc

SEQ ID NO: 555 - DNA, 1262 bp, Homo sapiens
gcgtgccatagagatgttcatgaacaagaaccctcctgccaggcgcaccctggctgacatcatcatggagaagctgactgagaagcagacagaggttgagacagtcatgtcagaggtgtcgggcttccctatgccccagctggacccccgggtcctagaagtgtacaggggggtccgggaggtattatctaagtaccgcagtggaaaactgcccaaggcatttaagatcatccctgcactctccaactgggagcaaatcctctacgtcacagagccggaggcctggactgcagctgccatgtaccaggccaccaggatttttgcctctaacctgaaggaacgcatggcccagcgcttctacaaccttgtcctgctccctcgagtacgagatgacgttggtgaatacaaacgactcaacttccatctctacatggctctcaagaaggcccttttcaaacctggagcctggttcaaagggatcctgattccactgtgcgagtctggcacttgtaccctccgggaagccatcattgtgggtagcatcatcaccaagtgctccatccctgtgttgcactccagtgcggccatgctgaaaattgctgagatggaatacagcggtgccaacagcatcttcctgcgactgctgctggataagaagtatgcactgccttaccgggtgctggatgccctagtcttccacttcctggggttccggacagagaagcgtgaactgcctgtgctgtggcaccagtgcctcctgactttggtccagcgctacaaggccgacttggccacagaccagaaagaggccctcttagaactgctccggctgcagccccatccacagctatcgcccgaaatcaggcgtgagcttcagagtgcagcccccgcatgtggaagatgttcccatcaccgtggagtgaggaaaacagtcagcttgtcctggccaaaggggtttggaaggacaccaagaccccgttggtgactgaagatgacactgagctttaatggctgaagacccagatcagggcagtgaccagatcacagggacatctgtggctcccagtccaggacaggaaggactgagggtctggctggttccctcttccattctaggcccttatccctgtttagttctgagagccaacttgagataccatatgctagcattcccagtccccagctggggcttggtgtgagtactttttctatggctattgtgtcaggtcactgtggataaaggcaaagacagatatttattg

SEQ ID NO: 556 - DNA, 3716 bp, Homo sapiens
aagcttgggagcactggggaagagaggcatggctcggggaggtcgcagtgaggactggagtggggaggagggggagatggaggaggaggcttgggaggggcagggggaacttaggcaggaaaggagcttgtagtagcgggggagtgaaaagagagatggagaaagaggggatgggaagaaagagggagaaagggagtcaggggtggggcatggaggtgggtggggctgggctgccaaagcaggataaatgcacagctgcctgctggtctgggctccctgcctcaggctctcaccctcctctcctgcagctccagctttgtgctctgcctctgaggagaccatggcccagcatctgagtaccctgctgctcctgctggccaccctagctgtggccctggcctggagccccaaggaggaggataggataatcccgggtggcatctataacgcagacctcaatgatgagtgggtacagcgtgcccttcacttcgccatcagcgagtataacaaggccaccaaagatgactactacagacgtccgctgcgggtactaagagccaggcaacaggtaggtgctccctccaccccaggggtcctgggtcccagcctggtttgttccccaacccccaagagcattcccagcaaatcaacactgatacattcatgatctaatgctcagattcattcagctttccctggctctccgctgatgcccttcatgcctaagcacgctccccggccgtgcacaaactcagcttcctttaacctgcagcagccactgtgtctgtaccatgactgtggcatttcccagggtccagcaggtgtggatggagactgtgcttactctgggtgggcttgatgctgctcaggatgagatccaggccatgaggttcatactcctccctgagtcctctctgcaggggccacacaggaacctggctcactgttctgcagagccctgcttccccaagtcacgcccctgggcacagccccttatggctagcggccttcaccctcaggcccggctgacaaactcccacagcctagggcgctgagtccctgctggggtggagcatgcctgaccctgcctctaccagctgatgcagttagacctcagccagatgaggacagtggtcacccagcagagcagaggaggggtcaggtcgggagggagcttcagcagggcaactgggcccagcttgacctgcatcccatggcacagcagcaaatagtgacacagtctttagagctcctccaccttctcctgaaattcaaaggaatccccaccagccccgtttctcctcttgcagctgtcagctggggctctctccctgcatacgagatacactccctggtgccgtggtccccgctggcctgcatctccctttcaagcatgacagtaacttggagtgaagcacagggcattgcagaccatcaggcccagaagcctattttagacatgggtaaactgacactcgagggatctcagcagttcctcctggttccaaagagtccctcatcccaggtttctccacagctctgccacattgtgtctgggaaaggccctatgcagggaaagggttcaattctaatctgcaactgtaagacacgcaggtgtgctgctgacttgagaaatgtatcttgaatctcacacttgaaatggtggcatccggacggccccattgatccaaaatatctgtgtgtgtgaagcatctcatttcctactctgagtgaagtaataaatctatgttaaatggagggaataagattttcagaagttaggtgaaattttgtcatcagacagaacttcctagaaaagagtcagtgttccctcgcccctgagccacagacagcagaattcaatgaatccttttacccagcacagagaaagcaatgtttaagagcgggtatgaggctcagcaccctgccagttgacaggaagagggggcttgtgtgccttgtgttgacatgtgggcagctcacgaagcccccaagcaagtccagtgactcagccacagtgaagtgcctgtgagtgcatgaactgatgggggcgctgtcctgttttctcctgtgtgcagaccgttgggggggtgaattacttcttcgacgtagaggtgggccgaaccatatgtaccaagtcccagcccaacttggacacctgtgccttccatgaacagccagaactgcagaaggtacgttcctgatgcaggtcccgggccagtcatgcactgcagaggggtgcgtatgtgtcagcctctgccctacacatgtttggagggtgtgtgtgtgtgcaggtgggtatgtggggagtcatgtatgcatggatgtgtacatgttcatgtacttgtggaggggtgtgcctgtaggtgtgcatgtggaaaggtacacgtgtgtacacacctgtgccagtgtgtgcagggaggtggatgggagcatgtgtgcctgtgcatggatgtgtggggggtgtatggggctttgtacatagatccatggggatgaggggtccaagtgagtttacgtagttgtccatgtatgtgcagatggggtggtgagggaggagggtgatgtgtttgttttgctaggaaggctttaggttgggaatggttactataaggtcaattctgcctgctttggagtgttgcctgttggacaggaagaagcagctgtgcggctgtgtgctgggcagggagaaggggctctgtctaatcccaggctcaggcacctgcatgcagccacagccacagtgatcagattagtgggacctagaggcctgttagctgggaagccctggacctgcccggctcacccaacaccagcctctccaaggacctgctggttcttgtgaggtctccactcggggaagagcctgagcactccccttgttgcccttgccccataccccagctctttgagggggagttgccctgccctggttcttccctctggcccctcttagtgctggcctggtgctggaagtggaaggagctgggggaactgagccgcctccccatgccctgcacccttggggctcccgaggcctgcccaggctactcctcacagggctgtgctgggacaggacactgcaggctggggtggggtcccaatgccacctggtgacttggagccttgggaggggcaatggaacagtcactattcattctagttcagcactctgggactcagtaggggtgggtgagggcccagtgtctcacctccatcctcctcacccaggctctgacatctcatgcctgggcatcttcccctttaactgtaacccacactgattggccctctctcttccctttcacagaaacagttgtgctctttcgagatctacgaagttccctgggagaacagaaggtccctggtgaaatccaggtgtcaagaatcctagggatctgtgccaggccattcgcaccagccaccacccactcccaccccctgtagtgctcccacccctggactggtggcccccaccctgcgggaggcctccccatgtgcctgtgccaagagacagacagagaaggctgcaggagtcctttgttgctcagcagggcgctccgccctccctccttccttctcgcttctaatagcctaggtacacacacccccacctcccgcaattaaacagtagcatcgcctccctctgagttcttgagttcttggctgtctggggatgtgcacgcaggcagggtttctgcagttcctttatgaag

SEQ ID NO: 557 - DNA, 451 bp, Homo sapiens; identical to SEQ ID NO: 59

SEQ ID NO: 558 - DNA, 214 bp, Homo sapiens
ttatgctacaggtttatttattatgaaacaaaggaatatgtattttatgtattttaccatgcataggttaactctttgccacagatttattggttcttgatacacctaaaataaaaaaaaatgtgtacctccaatagagagcaagcaagaatgattatgaagtaacaaatttaataaaggtattcttgttattaaaaaaaaaaaaaaaaaaaaa

SEQ ID NO: 559 - DNA, 411 bp, Homo sapiens
aaagttcggagcaggacggcttacctgttttctagatttgtcaaatctctcaataagcaaatgaatcctttcattgaggatattttgaatagaatacaagatttattagagctttctccacctgagaatggccaccagtccttactgagcagcgatgatcaactttttatttatgagacagctggagtgctgattgttaatagtgaatatccggcagaaaggaaacaagccttaatgaggaatctgttgactccactaatggagaagtttaaaattctgttagaaaagttgatggctggcacaagatgaagaaaggcaagcctctctaggcagactgtcttaaccatgctgttggatttggcaagtcgaaccagtaaagcttttcagccaacagacagactgtggaaacaa

SEQ ID NO: 560 - DNA, 2283 bp, Homo sapiens
ctcgcggccccaggggccatggcgaagaagagcgctgaaaacggtatctatagcgtgtctggagacgagaagaagggtcctctcatcgtgtccgggcccgatggtgccccgtccaagggcgatggccctgcgggcctgggggcgcccagcagccgccttgctgtgccgccgcgagagacttggacacgccagatggacttcatcatgtcgtgcgtgggcttcgccgtgggcctcggtaacgtgtggcgcttcccctacctgtgctacaagaacggcggaggtgtgttccttattccctatgtcctgattgccctggttggaggaatccccattttcttcctggaaatctcactgggccagttcatgaaggccggcagcatcaatgtctggaacatctgtcccctattcaaaggtctgggctatgcctccatggtgattgtcttctactgcaacacttactacatcatggtgctggcctggggcttctattacctggtcaagtcctttactaccactttgccatgggctacgtgtggccacacctggaacactcctgactgtgtagagatctttcgacatgaagactgtgccaatgacagcttggccaacctcacatgtgaccagcttgctgaccggcggtcccctgtcatcgagttctgggagaacaaagtcttgaggctctccacagggctggaggttccaggagccctcaactgggaggtgaccctgtgtctgctggcctgctgggtgctggtctacttctgtgtctggaagggggtcaaatccacgggaaagatcgtgtacttcactgctacattcccctacgtggtcctggtcgtgctgctggtgcgtggagtgctgctgcctggcgccctggatggcatcatttactatctcaagcctgactggtcaaagctggggtcccctcaggtgtggatagatgcggggacccagattttcttctcttatgccatcggcctgggggccctcacagccctgggcagctacaatcgcttcaacaacaactgctacaaggatgccatcatcctggcactcatcaacagcgggaccagcttctttgctggctttgtggtcttctccatcctgggcttcatggccacagagcagggtgtgcatatctccaaggtggcagaatcagggcctggtctagccttcattgcctacccacgggctgtcacactgatgcctgtggccccactctgggctgccttgttcttcttcatgctgctgctgctcggtctggacagccagtttgtaggtgtggagggcttcatcactgggctcctggatctcctcccggcctcctactacttccgttttcaaagggagatctccgtggccctctgttgtgccctctgctttgtcatcgatctctccatggtgactgatggcgggatgtacgtcttccagctgtttgactactactcagctagtggcactaccctgctctggcaggccttttgggagtgcgtggtggtggcctgggtgtacggagctgaccgcttcatggacgacattgcctgtatgatcgggtaccgaccttgcccctggatgaaatggtgctggtccttcttcaccccgctggtctgcatgggcatcttcatcttcaacgttgtgtactacgagccgctggtctacaacaacacctacgtgtacccgtggtggggtgaggccatgggctgggccttcgccctgtcctccatgctgtgcgtgccgctgcacctcctgggctgcctcctcagggccaagggcaccatggctgagcgctggcagcacctgacccagcccatctggggcctccaccacttggagtaccgagctcaggacgcagatgtcaggggcctgaccaccctgaccccagtgtccgagagcagcaaggtcgtcgtggtggagagtgtcatgtgacaactcagctcacatcaccagctcacctctggtagccatagcagcccctgcttcagccccaccgcacccctccagggggcctgcctttccctgacacttttggggtctgcctgggggaggaggggagaaagcaccatgagtgctcactaaaacaactttttccatttttaataaaacgccaaaaatatcacaacccaccaaaaatagatgcctctccccctccagccctagccgagctggtctcgatatcaagcttatcgataccgtcgacctcggaggggggggccggtacccaattcgccctatagtgagtcggttttacaaattcaattggccgtcggttttacaacggtcggt

SEQ ID NO: 561 - DNA, 354 bp, Homo sapiens
  misc_feature: n=a,t,g or c
tcctgccaaaaagcaggggggcaggcctaagccgtcctaggtcagctccatgtgccatgcacgccatgcaccctgttccctgacaagtttcaacaattgtaaatatttcttccttgaagaggagagcttgggtgggggttgggtgggagggacttgggtctttggtgctaggagagggcctgtgctccacacagccgtggttttctgattttcaccatgcccggggcctcccttcccacctgcctgtgagaattgggaggttagtgcctgaagctcagagctacacatttttaattagtttttacatttttnggataaaggttgaaataaagtggtgtggaatttttaaaaaaa

SEQ ID NO: 562 - DNA, 498 bp, Homo sapiens
ttaaagcaaagaattccccggtcccagccatgtccaacgtcccccacaagtcctcgctgcccgagggcatccgccctggcacggtgctgagaattcgcggcttggttcctcccaatgccagcaggttccatgtaaacctgctgtgcggggaggagcagggctccgatgccgccctgcatttcaacccccggctggacacgtcggaggtggtcttcaacagcaaggagcaaggctcctggggccgcgaggagcgcgggccgggcgttcctttccagcgcgggcagcccttcgaggtgctcatcatcgcgtcagacgacggcttcaaggccgtggttggggacgcccagtaccaccacttccgccaccgcctgccgctggcgcgcgtgcgcctggtggaggtgggcggggacgtgcagctggactccgtgaggatcttctgagcagaagcccaggcggcccggggccttggctggcaaataaagcgttagcccgcagcgc

SEQ ID NO: 563 - DNA, 1042 bp, Homo sapiens
ggcttgggaaggggaaggaaacttctctgaaatctgaacacctgctctcccggcaaggaaacttcgaaggctgaccgaccaagaccatcactatgaccgatggagactatgattatctgatcaaactcctggccctcggggattcaggggtggggaagacaacatttctttatagatacacagataataaattcaatcccaaattcatcactacagtaggaatagactttcgggaaaaacgtgtggtttataatgcacaaggaccgaatggatcttcagggaaagcatttaaagtgcatcttcagctttgggacactgcgggacaagagcggttccggagtctcaccactgcatttttcagagacgccatgggcttcttattaatgtttgacctcaccagtcaacagagcttcttaaatgtcagaaactggatgagccaactgcaagcaaatgcttattgtgaaaatccagatatagtattaattggcaacaaggcagacctaccagatcagagggaagtcaatgaacggcaagctcgggaactggctgacaaatatggcataccatattttgaaacaagtgcagcaactggacagaatgtggagaaagctgtagaaacccttttggacttaatcatgaagcgaatggaacagtgtgtggagaagacacaaatccctgatactgtcaatggtggaaattctggaaacttggatggggaaaagccaccagagaagaaatgtatctgctagactctacatagaaactgaacatcaagaaccccaccaaaatattacttttaaaacaatgacaaaccacacaattgttgttgagtaaaccacgcacaatggcatgtctttctttttctgccagaaaatctattttaagaaaccagaatagtcaacagtgttcaaaagaattgactagttatccctgaggccctttcaaacatgatcaaagatttcccaatgtgatctcatcatcatggatactcaatttgttttttcttatagagaaaatgagtatatagacatatacagagaat

SEQ ID NO: 564 - DNA, 2066 bp, Homo sapiens
tcgcgctggagggcagccgcttagcgtgcgctcttgtccccgcaggtcgcagccaggcggcgggcgcgcccagccccggcccctggagcgcccgccgcggtccccacctccatggacgccttcaaggggggcatgagcctggagcggctgccggaggggttccggccgccgccgccgccaccccatgacatggggcccgccttccacctggcccggcccgccgacccccgcgagccgctcgagaactccgccagcgagtcgtctgacacggagctgccagagaaggagcgcggcggggaacccaaggggcccgaggacagtggtgcgggaggcacgggctgcggcggcgcagacgacccagccaagaagaagaagcagcggcggcaacgtacgcacttcacaagccagcagttgcaagagctagaggccacgttccagaggaaccgctaccccgacatgagcatgagggaggagatcgccgtgtggaccaacctcaccgagccgcgcgtgcgggtctggttcaagaacaggcgagccaagtggcgtaagcgcgagcgtaaccagcagctggacctgtgcaagggtggctacgtgccgcagttcagcggcctagtgcagccctacgaggacgtgtacgccgccggctactcctacaacaactgggccgccaagagcctggcgccagcgccgctctccaccaagagcttcaccttcttcaactccatgagcccgctgtcgtcgcagtccatgttctcagcacccagctccatctcctccatgaccatgccgtccagcatgggcccaggcgccgtgcctggcatgcccaactcgggcctcaacaacatcaacaacctcaccggctcctcgctcaactcggccatgtcgccgggcgcttgcccgtacggcactcccgcctcgccctacagcgtctaccgggacacgtgcaactcgagcctagccagcctgcggctcaagtccaaacagcactcgtcgtttggctacggcggcctgcagggcccggcctcgggcctcaacgcgtgccagtacaacagctgaccgccccgccgcaccacgcgggccggcggccggagcggggaagggcgcgggcgcggaggacgcacgcggggccccggctcgcaagccccagctcaccgcgccgcggacctcacacctgcgcagccccctcctcccacttcccactccgggttggttttgtgtttgcttttccggaccccactctgccctccaaaaagacaaaaaaaaaaaaaaaaaaaaaagcaaaaagacgtcggagaaaagtgccgcgaaaaaatggatgagttgcaatttctctcgggatggcgcgggtggtgtgtgtgtgttcccacgggccccggaggcccactccgcggagggcacgcggcgcggtaggcaagcgccgaggcccagcggccgggggaggacaacctcgtatcccgcgcccccgccgcgctggatccggactgagcggccgggcctgcggactggatgtgcggggcctggacttgcctaggatttcccgaccccgtacaaaccaagttgccctctccgagctaggcccggccgagagcgccttaactcgagtcggatccgtgttggggcgggcgttgggtttggggggacggtgcccccagcccaggatcgggcactcagtggagccgcacacggcccggcgcgcctggtagagcctcgctggccccgcgccccggagccctatattaaggccacggagcgacagcgggcagtgcgggcctggcgggaggtgggggaggtccatctcagaacaccccagccttgagcttagctgcaggcccaggccctctgctctgctcccgggctaggaggtggccctctgtctgggcgaacagccccctcctcaccgcccgccgtgcaagagtcgagccggcagagcaaggggcgcggccccagggccctgcgcccactttgcacacccgctctccggcccgcgcccctgtttacagcgtccctgtgtatgttggactgactgtaataaatctgtctatatcgactaaaaaaaaaaaaaaaaa

SEQ ID NO: 565 - DNA, 625 bp, Homo sapiens; identical to SEQ ID NO: 80
  misc_feature: n=a,t,g or c

SEQ ID NO: 566 - DNA, 574 bp, Homo sapiens
  misc_feature: n=a,t,g or c
gatgangacagggtcgtgcccagatgatggagaaatcgacccagaagcctgaggaggtgtcctgggtttggctggctggctcctgctccagcggcccggcttcaggtgtccgggggcgtggctgcctggagcaggtgtgctgaataccctggatgggaactgagcgaacccgggcctccgctcagagagacgtggcaggaccagcgaggaatccagcctgtccacttccagaacagtgtttcccangccccgctnagtggaccggacctctgacacctccaaggttcttgctgactccggcctggtgaaagggaagcgccatggtcctggctgttggggtcccagggaagaaggctctcttctnggacaaacacaccctcccagcccccagggctgttgcaaacacattgccccttgccataaagcaccaaacaaagaacttctttgcagggtggagtgggctgttttttaataaagtttgttttacagattacggaaacagttcaaaatgggatttataatttctttttttgcattaataaataaagatcctctgttaacaaaaaaaaaaaaa

SEQ ID NO: 567 - DNA, 1707 bp, Homo sapiens; identical to SEQ ID NO: 88

SEQ ID NO: 568 - DNA, 3273 bp, Homo sapiens
gaattcggcacgagcgagtcgcgacgtcgtcggcaagcggccgccttccacgtaacgcgcgccggcgggggagggcgttggcgcggagccgacgggaacgtccgcgctgcggagcagggcagggaagccgggaggcgggcccggcccgagcttgtccttgtcgcgcaggtactccgagcactatgtcgtccccggcgtcgaccccgagccgccgcggcagccggcgtggaagggccacccccgcccagacgcctcggagtgaggatgccaggtcatctccctctcagagacgtagaggcgaggattccacctccacgggggagttgcagccgatgccaacctcgcctggagtggacctgcagagcactgctgcgcaggacgtgctgttttccagccctccccaaatgcattcttcagctatccctcttgactttgatgttagttcaccactgacatacggcactcccagctctcgggtagagggaaccccaagaagtggtgttaggggcacacctgtgagacagaggcctgacctgggctctgcacagaagggcctgcaagtggatctgcagtctgacggggcagcagcagaagatatagtggcaagtgagcagtctctaggccaaaaacttgtgatctggggaacagatgtaaatgtggcagcatgcaaagaaaactttcagagatttcttcagcgttttattgaccctctggctaaagaagaagaaaatgttggcatagatattactgaacctctatacatgcaacgacttggggagattaatgttattggtgagcaatttttaaatgtgaactgtgaacacatcaaatcatttgacaaaaatttgtacagacaactcatctcttacccacaggaagttattccaacttttgacatggctgtcaatgaaatcttctttgaccgttaccctgactcaatcttagaacatcagattcaagtaagaccattcaacgcattgaagactaagaatatgagaaacctgaatccagaagacattgaccagctcatcaccatcagcggcatggtgatcaggacatcccagctgattcccgagatgcaggaggccttcttccagtgccaagtgtgtgcccacacgacccgggtggagatggaccgcggccgcattgcagagcccagtgtgtgcgggcgctgccacaccacccacagcatggcactcatccacaaccgctccctcttctctgacaagcagatgatcaagcttcaggagtctccggaagacatgcctgcagggcagacaccacacacagttatcctgtttgctcacaatgatctcgttgacaaggtccagcctggggacagagtgaatgttacaggcatctatcgagctgtgcctattcgagtcaatccaagagtgagtaatgtgaagtctgtctacaaaacccacattgatgtcattcattatcggaaaacggatgcaaaacgtctgcatggccttgatgaagaagcagaacagaaacttttttcagagaaacgtgtggaattgcttaaggaactttccaggaaaccagacatttatgagaggcttgcttcagccttggctccaagcatttatgaacatgaagatataaagaagggaattttgcttcagctctttggcgggacaaggaaggattttagtcacactggaaggggcaaatttcgggctgagatcaacatcttgctgtgtggcgaccctggtaccagcaagtcccagctgctgcagtacgtgtacaacctcgtccccaggggccagtacacgtctgggaagggctccagtgcagttggcctcactgcgtacgtaatgaaagaccctgagacaaggcagctggtcctgcagacaggtgctcttgtcctgagtgacaacggcatctgctgtatcgatgagttcgacaagatgaatgaaagtacaagatcggtattgcatgaagtcatggaacagcagactctgtccattgcaaaggctgggatcatctgtcagctcaatgcgcgcacctctgtcctggcagcagcaaatcccattgagtctcagtggaatcctaaaaaaacaaccattgaaaacatccagctgcctcatactttattatcaaggtttgatttgatcttcctcatgctggaccctcaggacgaagcctatgacaggcgtctggctcaccacctggtcgcactgtactaccagagcgaggagcaggcagaggaggagctcctggacatggcggtgctaaaggactacattgcctacgcgcacagcaccatcatgccgcggctaagtgaggaagccagccaggctctcatcgaggcttatgtagacatgaggaagattggcagtagccggggaatggtttctgcataccctcgacagctagagtcattaatccgcttagcagaagcccatgctaaagtaagattgtctaacaaagttgaagccattgatgtggaagaggccaaacgcctccatcgggaagctctgaagcagtctgcaactgatccccggactggcatcgtggacatatctattcttactacggggatgagtgccacctctcgtaaacggaaagaagaattagctgaagcattgaaaaagcttattttatctaagggcaaaacaccagctctaaaataccagcaactttttgaagatattcggggacaatctgacatagcaattactaaagatatgtttgaagaagcactgcgtgccctggcagatgatgatttcctgacagtgactgggaagaccgtgcgcttgctctgaagccttgtgagcaaggaaggctccctgcatgtcatgcaattctgcacgccacatgggtgtggtcatgcaatcatcagttggccgccatcagtgtaaatagagcttaaagtcatggtttggctgcataaaaaattttctaacttgggttcaatatttgtagtgaagtatctgttttcatttttttcacgttataaataaaaatactatgctggccgggcgcggtggctcacacctgtaatcccagcactttgggaggccaatgtgggtggatcatgaggtcaggagttcaagaccagcctagccaagatggtgaaaccccgtctctagtaaagataacaaaaaattagctgggcttgatggcatgcgcctgtaatcccagctactcgggaggttgaggcaggagatcgcttaaacccaggcggcagaggttgcagtgagccaagatcgcgccactgcactccagcctcagcaatagagtgagactgtctcaaaaaaaaaa

SEQ ID NO: 569 - DNA, 3273 bp, Homo sapiens; identical to SEQ ID NO: 568

SEQ ID NO: 570 - DNA, 485 bp, Homo sapiens
  misc_feature: n=a,t,g or c
ccatctattttcctntaataaacttcagcacggacacaaattcgcccaacatgtaaaagtgcaattccgaaaggatcctgctagaacaaggtccacggtacaaaagcatcctatggttatgtaactgcagcggccaccaagcgtccccctctgggctctggagggtttcggccctgcctgcctcccccctcctcctggggcagctgggacaggggacccctgtttgaagacagcggggacaacggcccgggaggcagctgaattgcccattgtgaggcccttcttccttggcactgcctgaaccccgtagcccactccggctgcccgggctcttctgccttctcctggcaccagcctccgggcccgggccagcttgctaggagagcgagaacactgtttctgaaaggggtgctgcttgcttctttgttcccggttttccgaaagcgngaatcccgaaacgccgtgagaaacctcaggctctggcg

SEQ ID NO: 571 - DNA, 358 bp, Homo sapiens
  misc_feature: n=a,t,g or c
taatgttaaaaatcattttaaataaagttaccacattttcaataaaacttattcatccttccttgaaacagaaacacttggaattaaaacataatttgtaaaaaatcatgagccctgcgatgagtgggctgggagctggctccttccttctgtgcgtgttcgggaggcttcacgtcctcgcccgtggtccctgggtggcctgcagnaccagggggtggaaacaatgccagggagaattcctgtcacatcaaacaggaacattcactggattcctcttccagggaaaggagctgggggtggaagtgtggaaggacttgagtgttgtttcttttccaactccaggcagtgactccggctg

SEQ ID NO: 572 - DNA, 429 bp, Homo sapiens; identical to SEQ ID NO: 7

SEQ ID NO: 573 - DNA, 287 bp, Homo sapiens
caaagtttaattcaattttattttccacttttagtatttttcaaattatacaacatgcagtctgccagagtacccatacatcttcattttagaacctagaagattaccaaaattttccgtgggccagaggagggtgacttccagatcttttgttacatggactatagtacagcatcgttattgatataaaccaccattctcccctcaaaccccccggacaagtttgtccacaatttttttaatgtgaaagctactgtacagatacttaaagcccggagaacacacat

SEQ ID NO: 574 - DNA, 348 bp, Homo sapiens
gcaaaggaagccaattttattgaaatgcaatttcattgaaatcaaattcttaaacatttaaatctgtcacataatagatgtgcttctttattaacatattaaagattacaagacctagggggtggatctaattattaccataatttcagagtggtgctgtacataaatattttaagatatctgtaacgtggatatctgtgattcctagtgatgacagagacacaggtactaatactgctgtggtttgttgcctattttcctgatggaaataaataaaaacttcttttttccatcgaagttttcagatttcctgatttctatcctctggcccctttagattcacagatt

SEQ ID NO: 575 - DNA, 283 bp, Homo sapiens
ttttcacattttcagacatcatcttgtttattacaaaacttaaaacaccttccaggcaagatccaaagcaattttattctaacattgttcaccttcatctgtagagtcaaatgtatctgccagcttgtgttgacaagggggaatgcttcccatttggtcaaggttgagggacagtaaaggaatcttgtattctaatgagtacagcatcctttcattgtccaagccatccaccttaggctttgaggttcaagtccaggtctggagaagagaaagtttcataccc

SEQ ID NO: 576 - DNA, 324 bp, Homo sapiens
ggtctgatggcacatatttattgttctgtggtctaatcacagtgtttctaaatgtaaaaagtgcatatgttggtgtagctagtcccgcgacattgagctcctctgcatgaagacactgggctcctgcatccagctgtttttattgcaaactagctcctttctcccacactgggaactttagtccacgaggctgtcaccaccctggtagcactgggccaggctttgtagctcctgcagcagctctgctacgtcatcgtgctccactccagcatccatgaagctggcccagcgccgcaagtcgagtttggtgaggtctctggccaa

SEQ ID NO: 577 - DNA, 404 bp, Homo sapiens
tttctttcaaactttgtttattcacctgtaaaaaacttcacacacacacacacacacacacagagagagagagagagagagagaggcagacctaagatccctgttccaatccccagactcacctagggggtcagcacatacattccataccaaggtgacccaaacccactatcagggtctgtgcctgggcacaaaggggcaggcaggggcagtgccatcgtttgaaactaggtctgtctggttgggggcctcctttgcaggtccatatgccttttcacagcctcacattagggatgttcacagcagagtggcctgttcggggtgggggactggctgtcgataggctggtagcgagccctagtagcatctcggcggcggcggaaggccaggaattcctcccgaag

SEQ ID NO: 578 - DNA, 284 bp, Homo sapiens
ttttttaccttaagaaaaaccaatcgctttatttttcctcaatatatgtttagaaaactggtctgagaagaggtttcatgagatagaccagaggactatgtacaaaatcaagagttctaaaccaataagaaaaagggcacaatgaagcacacatccccaggggccacggcagcctaggaccttcctatcagtggggaggcaaggtctttgacggcttttgagttcagctgagggatcatgctgatcttcaggagtttgctgcttgcatacttattcttgatggc

SEQ ID NO: 579 - DNA, 352 bp, Homo sapiens
gcgccgcagggagcaccacctcagcctcagcgctagtgaggacacaggccgtcctccggcggggagcacggtggggtcagggtgctgtgtggtcccgcaaagaggcagctgagcttgggcctcaggtcgttccacaccttgctcatctccttgtgcccttggatctgagagttgacgaaggcgcggaggatgtgggaggtgaggggcaggtagacgtggatgagctgcgtctcctggtgcaggcagtacagggagaagtagttccgcagctccatcgtctgaatcgcgttctcctccacgatgcgggactccagctgctccacggactccggctcgcggttctgcgcggtgg

SEQ ID NO: 580 - DNA, 413 bp, Homo sapiens; identical to SEQ ID NO: 38
  misc_feature: n=a,t,g or c

SEQ ID NO: 581 - DNA, 323 bp, Homo sapiens
gtagagagcagagatgataattttattgaattttgcccccaagactcacaatgcaatacagattcatattcagtaaacacttattgggaatctacactatcaggaatgctttttaaccacaagtaatggaatacacaaataatagtggcttaaagacattagttatatcacatgacaaaaaggctagagatcattgtttttgtgttaacttgttgcattgctatcatataactgctttcacttcaagcactgtgcagagcctcccagaggacctccgtgtgtgctcctttggttcttcctaggttccatagccagccttagct

SEQ ID NO: 582 - DNA, 327 bp, Homo sapiens
  misc_feature: n=a,t,g or c
caacatctaaatagactttnatttttattttacttgtttggacagaaaagaaaattcatcagctttcattagagtctccttaagtnttggaaacaanttaaactcagaaatagtggaccttgtagaaaagcatcacaaattaaaaatatatttctccatgtggtaaaagtgctttcaatcccattaaagggcacagcaagggtgtttggaaacacgatctgaaatttggcctgcaatccgtggcatcgattccaaccacagggcgggggagtcaccatgatctagagcacaggagccacgtggggcccggagcatgcggacagcaac

SEQ ID NO: 583 - DNA, 309 bp, Homo sapiens
  misc_feature: n=a,t,g or c
tgatagcacattttagtttttaataaaatctgctttttacttatatttaaataaattgcccagttactgaatcagaagcatttcttacaaagcaaacaaaataagcatcccttctatgttaataacatgttaatagtatgttggcaagttgatttagaacaacttgccaacaatacaaacagaaaaaaggagtgggtcaaagaaatctagtttggctttattttcaatagatcatactgtctgttgaaaaaggaataaataattatggagcctatctaataatatactcaatagnttgaaattattgag

SEQ ID NO: 584 - DNA, 243 bp, Homo sapiens
  misc_feature: n=a,t,g or c
caaaatacatgtttttatattttaccatatgttcacatttacaagangtctttataactctatatggctgtaagttactatttcctttcattcaacctgaattcctcccttcagcatttctttgagagaaaaaataggaaaattagtgattggaggtccctataaaattttcttacatctcaagtgttcctgaaatcaggtgtttgggctttatgaaattctgagtaactttttttttaacaa

SEQ ID NO: 585 - DNA, 354 bp, Homo sapiens; identical to SEQ ID NO: 60
  misc_feature: n=a,t,g or c

SEQ ID NO: 586 - DNA, 580 bp, Homo sapiens
  misc_feature: n=a,t,g or c
tagggagaagtgccaacatatttgcagtttattttcaaatggttcagaggctgtctgtgtacatgagaagacaaagataaggcaaatgcagcaaaattgtaataattggtgaatccaggtgaagggactatggctggtctttgtacttttttttccaacttttctgtaggtttaaaattttcaaaataaaaaatgggaaatactttaaaaattgtaatcaaagacattagtacagaaactttcataatgtattttatttttacagtaaaattaatttatgtaaattgatagaattttactaatttcactcccaagttacattaaaaggcttacatatgtttgataatagcatatgtaaactagaactctgaatgatatccattggtcataatacgtactatgtagcggtaatggtgacntttgtgattgcacaagtcnagagatgccccaaatgacattgacctagacatcngggttattcnaaggctgaacngaagttgaatagaagggtttagtccaatacngagatgaaacngaggcagtccnggcgggggggagtgagtgtgtgtgnatatatncc

SEQ ID NO: 587 - DNA, 466 bp, Homo sapiens
  misc_feature: n=a,t,g or c
caataatatttttattaaattccatggtggccttctctcaaaattagtaatgaaatgctgaaatgtccattgattagtgagggcaatgtatgtaagccagaagaatgcaataaataagggttatgtttcttcttgtcagacccagaagggagatctttgaacaacagtgcttcaaattgagaattcagtcccaggaagggtctctctgccccacagactgtggtggacaaacactgggtgtaacactttatcttcatccccaagccccagaaaattagaggcagagtctttctgacttgggtaccagtttaagtccttattaagcagcaaaaattaattccaaaatttggatgctgnccttgggaagaagcatacaggaaaatgaaaggggtaagagtaatacagcagcccatctgttggttcctaggtcctccatctaagaatcgttcctttggctgggcacagg

SEQ ID NO: 588 - DNA, 498 bp, Homo sapiens
  misc_feature: n=a,t,g or c
gtagatatggggttccgccatatcgcccaggctggtcctaaactcctaggctccagtcatctgccagcctcagcctcccaaagtggtaggatcacaggcatgaaccatgatgaccagctggataaattgtttcaggaagggttgagatgatgttgaacatcatgccctccacatcaatttacggggaaaaaaattcatcttgtttctgccgattcaagagggactgacaagaggcaggaaacaataggccaacactgtgggtcattttcaactgggtttcaggctttacaaaatttctggacttgaaaaatttaaaggttgagggcaaggctttttccacttcaatggggctggtttaaaaaccctttttggcacccagattccaggcttnttaggggacaggaggcagaggtttttgggggntagggaaaggtttttngggacaagttacggtttccaaggttccncggagggcanttttttttcggagggantttt

SEQ ID NO: 589 - DNA, 237 bp, Homo sapiens
  misc_feature: n=a,t,g or c
ttttttttttttttttttttttttttccngttggaaattttttatttaccactgcaaggtttttgctccaaagtgtcacaccagacatatgactacaatgtctcatgcatctttttgtgctttagttcatgactgcaaaacacacacttagcatttgacaacaggaaacacagagggcagaaacaaatcacaaggactagttggtttaggttacagccacattttccccggggctcc

SEQ ID NO: 590 - DNA, 256 bp, Homo sapiens
tttttttttgcaaatcatcagcgctcatgtttatttataaagttacatcctaaaagtgattcgaacaataaatagttataaagaagatctgctgccctaccctctgggtgtgaggcctccatatggagtcagcagaggatctgggagggatcctgggaagctctgggatcctggggtctctgccgtctcagtgggcgcaacagaagccaggcaagcttcccacccttccttgcaggcaccagctgggcccccaggg

SEQ ID NO: 591 - DNA, 392 bp, Homo sapiens
  misc_feature: n=a,t,g or c
acaaagagaaaattttattttcttattcttgaaatgactgtacgatttttcaatgttaaagttcactttcaagtatgatcaataacaagacatcaaatgtaaaaattatgctgtattatcattttctccattgcttcttaaaccactgaaagtaatttcacaattcaccacatttaggcatcttctttttcactttcttcattttttacttctttaggcaacaatggatcaatcttcagtaataaaccttcacttgttgaactacgaaggaaagcacgtaccacaangggacccaaattcaggcgggtctgtgcctacaaacttcattaataactgcttgcggattgggcagctatctgggtcacttgacatatccaatgttggctattttg

SEQ ID NO: 592 - DNA, 216 bp, Homo sapiens; identical to SEQ ID NO: 72

SEQ ID NO: 593 - DNA, 538 bp, Homo sapiens
  misc_feature: n=a,t,g or c
tttttttttttttttaagagatggggtcttgctatgtgcccaggctggcctcaaactcctgggctctagtgatcctcctgtctcagcctcctgagtacctgggactacaggtgcacaccaccttgaccagtcacagtcctttttatataaaatttgggttttattttcgcagtattagcacccttacataggtcttgttatctgtgatttcatcaaatattatatttttctgaggccagggtttcagatatgctgattagtctttcaatcaagattaagaacaaatgcttcaattttcaattttgtttatattcttatagggcctctgagggttaaaactaatttattaaatgtgttattcattcccaaaaacttttaaaaatcccattttatttaattaatttatttgaggacataggctcactctgtcgcccnggggttgaggtgcaagggcncaatcgtggggctcaatgcaacctccgnctccngggggntcaaggcaattctggcctcaggctcccaagtaggtggggggcct

SEQ ID NO: 594 - DNA, 552 bp, Homo sapiens
  misc_feature: n=a,t,g or c
ttttttttttttttttttttttttttttaggtaaactctttaatgaaagacatttattgtcagattataaaatcagtgttgatgataagccctcctacccacaaaacaaaaatcgtatgtatgaaattccctttcccgtaagttatgtgcctgtcagccatcccacttcagtccatctttggatgctgaggctctggttgccagtccttatctctacacctgtccctggtctagaggagaaacgaaggtgctctgaggcccctgtaacagagacccttgtcatccatatttgcaataaagacatcatggaggctgtgcaaaagtatccttctccccaacttctgcaggcaccatttccatctcactacccagaggtacatcagagagcaggagccaggcaggtgacaaagatgtggaaggcttctaagtggttggctttgcgtctcagaagtgcgaagaaatgaaaatccatcaaacagaatgccattccatgtttcangctttacctcacctcnaatcnaatggctggtcttaattattgggccataagtg

SEQ ID NO: 595 - DNA, 510 bp, Homo sapiens
  misc_feature: n=a,t,g or c
tgactttgccaaagatttaatatccacaaatgtacaatgctcactgggaaccaaagtcaggcatggggctgggctttaaggagcacaaacaaaaaggagggactagaaaacttcagaaaggtattggtgtgggatgttgtcggggggacaggggacagcgaggatgtgggatcccgagatcatccaaatccctatgtgtagacatatgtgtataaaggcctttaagagactcaggctgatggggtatcagatactcaagatgggtggtgccgggctctgaaagacatgcttcaagtaagagggactagaaaactccgccagggaagcaacagggatcagggattccaggaggatccaggggcctggggacttgttaaacacagattgttgggtctcactccctagagtttcntcttcaagtattctggggagcagccctgtgaatcataataccaagtcagggaggggtgtccaccatcaaatgttccagcntgcagtgggcccgggaag

SEQ ID NO: 596 - DNA, 456 bp, Homo sapiens
ttgagatggagtctcgctctgccgcccgccgttctctcagctcactgcaacctctgccccccaggctcaagcgattctctcgcctcagcctcctgagtagctgggattacaggtgtgcaccaccaggcctggccagtccttccattcttagttcttgaggttatgcagtgtctttgccctgtgcttctcttgtattatgatccaaactcctttgtttaaaaaaaaaataaaacacctaaatataatccaaatgtgctaataaatgtgaaacagcctctttctctgaaacaagttcttcagtaaaataattctgtaatgtattgctttgcttttcttacatgaagttatgctattacaaaattaagtttcaattacaggcaaggttaaactctgcaagcaacccaaaactcaaaaagggctgaatgataagtcattcaggtaaagacaaaagaatgg

SEQ ID NO: 597 - DNA, 415 bp, Homo sapiens
  misc_feature: n=a,t,g or c
ccaatagtttgactttattaaatcaatagaacgggatctcagtggttaagccgtcttaacagggccaggtctcttgaggtagtttttgggccatcagttaattacatcgactttccaggaaacagactatggagaatgagaggaatcagactgcctgtcacacacctctcatggaaccccctagtgacacctataaggacgttacagatctagttccagactttacagatctagttctattttctcaagttacagatggggaaactgacggccccagcaggggaacgcgggatgtatctaagtcactagtgagttggcggcagtcaggtctcttngattnttttccccatactctcagcccaacttctcagtggagaggggctggcagggctgcttctctggatagaatgtagcg

SEQ ID NO: 598 - DNA, 265 bp, Homo sapiens
gttttttaacattttaatttcaacgtgccagcatttgtccaaatgagatgatacaggctagaatgcacggcggaattccagactggactcactccataagccaactcatcactgcccgtgaacatgaattctggtcctcagagaagctgacattgtttccctgaacattcccgtggtctccctctgaaagccgatgaccatccaaccctgactcacctgaaatatcctacgagcatcgccctccgagactgacgattattaacca

SEQ ID NO: 599 - DNA, 400 bp, Homo sapiens
  misc_feature: n=a,t,g or c
cttcgccgcttctcgtttttctttgtgaacaggactgttttcaccattgtagaaaacatctactttctcttgtaggattttccgagctagctttctgttctgatcaactgatcttgtctgatggcactttacaacgatgcctgaggggatgtgcttcagacacgcagttgctggttttgttggttgcctggccccctggaccgtgtcctttcacaaactgctcttcgagttcattctcatccaaggaaagcagtgcacgggtagtccttcttgcctgccatctggaccggagtgacagctattcctggggataaacaacgttcaggctttctcccaaagccggagtccccatgggcgccgggnatattcgggtcaagtnggtgtaggaaaatgaaataaa

SEQ ID NO: 600 - DNA, 265 bp, Homo sapiens
acactcaaaacctttattcattgatttacaaactgtacaatatttacaaagtttaggcattaatcccatattgacatgaatgctgtggagagtctaaaaataaatatgtggcacatagcttaatatacacatcatggctctttacacttaagccattaccaatagtgagatgtaatggagaatttaatgtggtagaaaagtcagagtggctgaccagtcccggaccttccatgtgaatgactcttccttggctccttgaggctgg

SEQ ID NO: 601 - DNA, 118 bp, Homo sapiens; identical to SEQ ID NO: 1

SEQ ID NO: 602 - DNA, 234 bp, Homo sapiens
tttttggctggaaattagatgaccaagctcggaacggagcatcagggccctcgtttgtaagcttagttttcttttattcccaacaaattccatccttttatcactgggtattagcaagtcaggtcagaactattcattatttttggccaaagacattcccactaaagaagggacacagtgtggtaaaatacattctagagataagatgaggcagagtgcgagtgagtttgctga

SEQ ID NO: 603 - DNA, 441 bp, Homo sapiens
  misc_feature: n=a,t,g or c
aaggacgaatatctcatttatttccctgcagctctcatcccctgctcatccaagcctccctccttccagatgaataggaacaggttacagctgacccagtttcactcccagcttcagaagatgaatcacggtgggttggcggacaaggaatggggcaagctggggcagcgcggaaggcagtgctgttttcaggaggcctgacctctgtggccagagtccccgtcagcaccgcttactgcaggccaagatgcctcccaccctccagaatccgaccgcggagggaagcttccagtccaggagcctgcggggaaatcctggcgggggctgagggctncagcccctnggcctnggcatttgggtgcctctttagggatctttncctggggtgccctaaagggttcaaccggttgttccgtnctggaaagggccgaaaaataaatt

SEQ ID NO: 604 - DNA, 386 bp, Homo sapiens
gaggattatgattctggaaatttattaggtttttttttctccattaaggaagctacatgcaaaagatacaacatacagaatatctttaaataacacaactcccagacagggacaggacaatatttgggggggggcattctgtctttgctttgctatgttctatttttaatttttttgttcctctggatgaaatttctgagatgttactagatgggggatgtgggggtgctaggaggggtgggagaaaagcagaaagcagtacaaatacgagacttcaagcagattcttagagcgactgggaggtaaagacatggagagggtttggtggaggctctgggtgctacgacaaacacacgaacacttagccgaactttccaaaacgtcta

SEQ ID NO: 605 - DNA, 462 bp, Homo sapiens; identical to SEQ ID NO: 4
  misc_feature: n=a,t,g or c

SEQ ID NO: 606 - DNA, 606 bp, Homo sapiens
  misc_feature: n=a,t,g or c
cattctttcatggacatctgttgcccatggtcaagtaaatttttaatgacacatagtcactacacacctttcagccttctggagaggtaagtgtacattgatctgtcctaattagccttgcagagtacttcagacatccctgcaggaacactattatttaataaaatagaagctgttttttcacaagctcagcacttgctccttggatagctgtattgtttttttgctcttctctccttttaaaactcatatcgcatgtctcatgttcgtctttgtctttgacaatgtagtattaatgcagctctttgtgtttctccaacaggctctccagccgctcaggtgccctctgccctggccccttgtttctttcagcctcatactgacgctgattgatatcttcgtgcagactcagttggagggcaactctaccagggaggtcatcagtttcatagcagccagggtgctagtgtgacagaaaggcgcagacttgtgagtctgagaagccagtgagcagggagatgaagttgtccatanggaagtcatcatggaggangagtactggcaccgacagaccatgtncccacaaactcacagaagctgccctgg

SEQ ID NO: 607 - DNA, 487 bp, Homo sapiens
  misc_feature: n=a,t,g or c
aatgtataaatttgagcaatttattttagaacttttgaatctgaaaatcacctgcttgacattcatttgagaaagtgaaacataaaggagagtaacataagcaagacgacagaatgtgaggttctgcatccacatcccccacgacataatgcagctgccacagcaaacataagtgcattcatgaaagccttggaatccagttcagagtttgtggcacccagctggaggcaaagaccaaggaagacattttcagagggtgagcacttgaccaagtggcaagcttgccaattcacggttcccggcttcaaaacagaatactgccacattcttactgtagacttggctataactcatttgaccttggtcctgccactggnaacaatncttctttccttctccgcctggtncggaagaaattcatttcccgcttccggatgttccggcacctaactatgcgttccccaggacctacagatcgcgggcaaca

SEQ ID NO: 608 - DNA, 563 bp, Homo sapiens
  misc_feature: n=a,t,g or c
aaccaatcaaataatttctttattgtgcttctacattttcccaataaaaacttgcacttgatgttttgtctctggaatactaacgctctttcagtcaggtgttccccaattcataaattgcttttcactcaaataaaccctttaaaattttgttgtgagtcagatgtttctttaacgcatggttgcaaaacgtgctgttagtaaggaacatgactgagatctacattcaggtcctagtgcagtttcttttgctgtcaccagggccatcttgctggcttgcacaggttatgtgataatgactgggcatcattcatgggaaactgcactgcgtaagggccctgggctaggcccaccagtaggccccgggcacattttcagctgcgacgaagggactagcaaccggtgangtagaaggagaaccaagagatgggtgggagaatgggaactgagctgagagagcttccggaaggttgcggtggcctaggngaatccacgtcattgagaaacggcgttagctgattttcacgggggcagatgacatggaagtgctgctgaaggaaaca

SEQ ID NO: 609 - DNA, 465 bp, Homo sapiens
  misc_feature: n=a,t,g or c
actttctatagtagtttattcttcataaataaatcactattataactgactacttactgagaaatgaaaatattttaacttaaaaaaatacagagcccttgttgattaacagaatttgtcttaaataggattttatctatagtatcatatatataaaatccttatacaagtaaccattgaaacaagtcagtaacaaaatattcacataactgtatcacagatcttaggaaacagacattcagaaaagatttaaggccactaagtaacagcctctcataaaacccaacaaatcttaaaattgcnattagacttaaaagggacctaaataccacttcatgctgaaccaagattagaaaaatcttccactcttgacattttcatgttcttagtttttccaatcaagtgatcagctgtgataaacccatagggaattgactctataaanccaacttgggataaggangc

SEQ ID NO: 610 - DNA, 275 bp, Homo sapiens
  misc_feature: n=a,t,g or c
ttttttttttttttatataaatatatagactgtgtgtatatattataaatgtatctatatatgtatatatgtacatgcacagctcagagcgtcctagcctgatacagggcctgcctggtgcctcctggagnctggccacctggggctgtcacttgaagtcaagagtcctggtgttagggatgtagagggattgggtctggcgactgcgtcgtggcgtagtgttgaggacgtccacgctcttgcggctggaacgcaccacgtctgccacaaagctg

SEQ ID NO: 611 - DNA, 258 bp, Homo sapiens
  misc_feature: n=a,t,g or c
tttacactttactgagacaattttattcactatggatatatatacatgatcaacattttatcttcattcttcagaagacttaattagagtagctttcttctcatacttatctctaatctctttaatattttccgagagatcttctgacatgcattcntcatattctctatcaactttagcaatctgctcctcaagatgtttctctacagacccaacatgtgtagcaaccatctctaacagacgttgcaagttaatttc

SEQ ID NO: 612 - DNA, 419 bp, Homo sapiens
  misc_feature: n=a,t,g or c
aactgaatgtgtctacttttattgtaggacaaaatcttgacatctgccccaaaatgacatctataacattgttcttaatttanttgcacacagattaggcagcactgtgacttattaaaatgagacactttctaccacaccaccataatgtgtcagccagctaacactttaatcagctcttcctggactttctggtgccatagcaacctatttgtagcaatgaattatctcctgaaattcaatactattggtnttatgcctttttagcagaagctgtacttttttgcaaagtcctgtggtataagttccccagatttaaatttccttggcaaatgggtttttcnaccatttggattttttttttaaagggtcaccaccaaaanaccttttcntcctanccatttnaaggaaaaaatggt

SEQ ID NO: 613 - DNA, 476 bp, Homo sapiens; identical to SEQ ID NO: 13

SEQ ID NO: 614 - DNA, 422 bp, Homo sapiens
ttttaacagtttctaaaacatttttattgtaaaaagttcaagaagccatttacaagccaaaaagtatcagaattaaataacacataatttttatagacacatttttctgtacaaagggctgatctttataggaattttaaataaataatctaaaaatcaatgtcactgattgcaaaataggtctctctctcgaccgtctcaaggtgacatgcattctatgcagccaaaagatgaggggtttgacatctgtgacgagcccgggcagtgagtctctggcgaagatttctcactttcttaataagattctgtcccgtggtgtcccattctactgctcttctatttaaagaaatctgtgttgagggatccatttcagaagagtcatttaattgtgaggttctaggcaaacagcttgagtcctgttc

SEQ ID NO: 615 - DNA, 461 bp, Homo sapiens; identical to SEQ ID NO: 15

SEQ ID NO: 616 - DNA, 402 bp, Homo sapiens; identical to SEQ ID NO: 17

SEQ ID NO: 617 - DNA, 414 bp, Homo sapiens
caaagaactgattgcacagtatacagaaatcctgttatactttactacttaaggtggagtctaattttttttttttaatttatcagtgcttaaaaatcttcaaaatagcttagtgaggctcatgacagtgctggccccatggaaatgtagccttttgttgcgtttaaacactgtcacaccatctatgactgtcccattggtctgaagtgtagtggcaaactaagcatcctataagacaagctaaagcttgctttttgccagtcagttgaaagtcttgcatctcttcactgatgcactttctttaggtattgatagtcagaagcacaaagcatttattatgcattcaatcatgtagctaaacaaaaaactgaagtctcctgaagccatttaaaccagccgttccaaaatctcctg

SEQ ID NO: 618 - DNA, 377 bp, Homo sapiens
aaacattaagattttattacaaaccatgcattatatatttctttacacttaaggaatagatatgaaacaatcttggagtaaaaattagaaggcaacttgcttcaagtttgtaccaagtcaatcaagcagaaacctgaagaaccttgttttaagatgagagtcatttatacttggcaggcattttcttccaatgaaaaaataaagtcaatgtgccattatcttgacacttataaaaatgtttataaaaagcatttaggccattgattctcacagttggctgaatattggaatcacctagattaaaaaaaatactaatccctatacaacatccccaaaattcagatttaattagtgtaagttaggccctgggcatatag

SEQ ID NO: 619 - DNA, 204 bp, Homo sapiens
gtaccaggcaggggacctattttacaactggctttgaggagcttgccatctgaacagtctttagtagtatgataattacagagacacttcgtacaataatcaaatccacagccttctcgtttgcaggttgcccgttgtaaatagcaatcatattttgcaggtgaattacagcgaatacaggctttgaggctttcggtccttttc

SEQ ID NO: 620 - DNA, 402 bp, Homo sapiens
cgttctcatattttataccattttctgtgtgtacagggtgtgcaaattaagcaatttcaataaatattagaaatttattttgcaaatataaaatgagtaaaatcagctaataacgcaatacaataaaatcatgtgctaaacagagctttttccccatgaacactttttaccctttcctttgaacatcctgacacttcctaaatacaatttatttcactgacttgtagaaataagcaaaagatgaaatattaactagctgcaagatactaaatactttagtaataagagcttggagctgtcaagttgtaataaattgaaaataacagaaaaagtgaaatacgctgcaaattaatgctcaaaaatgcagccatctgacttgcaaaatacacaatcctcccagcc

SEQ ID NO: 621 - DNA, 477 bp, Homo sapiens
ttttatttcatcactataattttaatcattaggcatattaatgtcacatacagtttttaaaatataaatatttttaaagctgttttacaatatgataacaagaacacccagcagatacaggttgtacagttaatcattttgactgtgtcagtaatataatcagaatactgtaacggtaagagaaaaatactttttttttttttttgagactgggtctcgctctgtcgcccaagctggaatgcagtggcgcaatcacacctcactgcagcctcaacctcctgggctcaaggatcctctagcctcagcctcctgagtagctggaactacatgcatgcaccaccacactcagctaattttttttaaatttatttttagtagagacagggtctcactatgttgcctaggctagtcttgaactcctgggctcaagtgatcctcctgcctcagcctcccaaagtgctgcgattacaagcgtga

SEQ ID NO: 622 - DNA, 427 bp, Homo sapiens; identical to SEQ ID NO: 24

SEQ ID NO: 623 - DNA, 374 bp, Homo sapiens
ttttagaaaaaaaatatttacacacacttttgcttttttaatatgaggtacacagtccaacaagaaaaaaaaagtaactgatatagtaaaggcactcagaaaaacaacagaaacaatatgaaaggtgttacaagagacagaaagagatgaaggatgatgattagtactcaccttcttcaaagctgcagtacggactttcctctttagggagagaagattagaaataaacaggttaaaattacattaagaaagggctactacatatatataatggggtaattatttatatagatctttaagaaaaggcaaattgagttctttaaacacatacgtgtgagaatgggacagatctgcattatctaacaggatggtta

SEQ ID NO: 624 - DNA, 403 bp, Homo sapiens; identical to SEQ ID NO: 30

SEQ ID NO: 625 - DNA, 422 bp, Homo sapiens
ttcagcttcaatgaatttttaattttgttcaatcttgcatttgttcaaccaaaaacaatttaaagaggaacacgacaatcagccttagattgagcaagttcagctcctcactagggagttcttgaatccaccatgaaaatcaacagtgtgcatctaacagttttcttttaatttgagaactgaaaagtgaatcatcacatcaaatattcttcagggtctctttggtttccagattaaacatgtaatgtgacggtcatcttgccacattctcacatttccattttaaataatcataaataagaaaaccttactattctttggcataacacagctgattgattccgctgagtttcaaagtcttagaaattgcactcattccttctttagagtcctgcttcatggcaaaagttttcagctgaaag

SEQ ID NO: 626 - DNA, 382 bp, Homo sapiens
ttttttttttggccttccaatattatgaggttattttgaggatccagggaggtaacggatgtgaagagcgtgtggtgaactgtaaataatgactatcacatttagttctcctacaatccagtgaggagtagtcacttgctcgaggtcacccagcgctggcaactgctggagctgggatttgaacccagctagcagtgtccatgctacaagagtggggccagccttggcacaggaggttgattgctgcagccagtgtttctagagttccagatatgaagtggtctcatgttctccttgggaggaggcccttggcttcccgaagtgctgggattacaggtgtgagccacagcactcagccaccagagcttttttcaaaccggag

SEQ ID NO: 627 - DNA, 498 bp, Homo sapiens
tttatttcattaagatttaatagttttttttggactaagtagtggaaaaacttttatacttaactgagacattttgtcaaggctaaaaaaaagtcttgcaaaatggggcagtggactgacaggctgacatagaaaataaactttgcccaatcacaacttgtgcctcccatccctggagtactgactggcaccggtaagacagaatctctttgaatccattactccatgcccccttgaggcactgttgaagaaatctcacttttcagccagggtactggttctggtacatatggatcataagtccatttggggaagactcgtttatacaggttcatcagtactgtgtcttgagattttagcttcccatcaaagctgcatttcatgtggccatgggtacctaaaggttccttgatatgtcctctccggccccacttcgttctcagttccacggtttaaccacagcacatcctctctgttgaagaacatgtaacgtactac

SEQ ID NO: 628 - DNA, 423 bp, Homo sapiens
tttttttttcatcttataaggaacatttatttggtaaactatctcatagaaatagactctaaaatcaaacagtttcttaaacaacagagagcataatcccaatctctccccatgaaaagcctacttcataactgaagtacctaaagcccatgaactgcattactagaagaaaggagggaaaaagacatttactaaacttccacaggaagactgtataaatctggaagtggttaagtacacatcagcctgtatccaagaatactactcagtctcaaaaattaactgaaaatctaaacttaatatggatacttctttgttcttggtaaggctcagaaaattaccatctatttaagtacgcatggtactagttacatgtcaactgatataataaaaaaggtgaagtggacaatcagtatttcaaac

SEQ ID NO: 629 - DNA, 497 bp, Homo sapiens
ttttttaggctttctcttgtctttattctggggaggaggaatcctcctcatcatcttcctcatcttcatcattgaacgaacagggggtctcgcctcgggactcggagcagtgagaggccgcactgctggactggtgactgtttggggccaggaactgcccagttgctaaggccacttctgcatccaagcataacccttggtttacacttgactggggtaaggtggcaccagtggtcaggtctaaatttgaaactgattgggtagagttcagaagtagtccctgatttaaccaagaaggtcctgtggagatatctgtgatataaccttctaaagcctttgcaccagggatttcgcaagtttcagatcctccagagagcatttgcctgactccaggccaaacgacattcccatcgctttagtacttctatgtcatcatggatctcaaaggtgttgtcaaaattgaaaagatactcaaacttgtcactggagatgctgca

SEQ ID NO: 630 - DNA, 407 bp, Homo sapiens
atcytatcmghcmcaamcggtttattycttttcgwcgggaaaaaattaaaccmmattcmaacggtgyttaacttacaggcagraaccaaagtagscatttawtgcgttagatatcggatacaagacatacacyggggagaatgcttcaccatctgamgmtcacaccacaayggcccagtggacagctgtgcactctgctcgtgcttamgygccycggystggcychggggacggcgtgtcygmagaacagaagaacagctgtgtttcacamgtactgacgcattttcgactgcayccggggggtatatattttyhcscygmcgggrcghggggaaatcagcaaagtccctcccacagagcattmggctgcctygcagagagccacggcagagamgcggacttctcct

SEQ ID NO: 631 - DNA, 481 bp, Homo sapiens; identical to SEQ ID NO: 48
  misc_feature: n=a,t,g or c

SEQ ID NO: 632 - DNA, 415 bp, Homo sapiens; identical to SEQ ID NO: 49
  misc_feature: n=a,t,g or c

SEQ ID NO: 633 - DNA, 371 bp, Homo sapiens
  misc_feature: n=a,t,g or c
gnaaacatttattttcaaaaagattgaacactaagctatcaaattctgctctacagaaatgcatatgggataatcttattccttaccatcttgttacaaataaatnctaaacatttnctaaagatattcaaactgagttactacagacgagtgcctatcaagtgaagactctgtatagaggaagtcaggganttagggctgggcacggtgggctcatgactgtaatcccaggcgttttggggagggatcgcttgaggcccaaaaggtttcagaccggccggggggcaacacagtgagggccccatggcctctattaaaaaaaaaantaattcgggggnttcccccttacaatngggggccccggnaattac

SEQ ID NO: 634 - DNA, 421 bp, Homo sapiens
  misc_feature: n=a,t,g or c
aagatatatgtatatatatatttnaaaatagtatgtttttattgcaaaatattcattagtgtcatcatatcatagccagatctacaaccccagagtaattcccatggttatgttacatggcaaaaaggactctgcattgtaattaagtttattaatcagctgactttagcattgggagattattctggattgcccaagcacttaagaataggagaaaccggagagatgcagcagcaatagtcagtggnttcaaatatgaaagggatttcacatactattgttgggctttaaagataggaagtcgtggggggcaagggaaactctctnaagggaaantaatcngggcaacaacctaaataattcccagaaaangggttctttttccagaggtccaggacagagccngtggggttctttccnt

SEQ ID NO: 635 - DNA, 452 bp, Homo sapiens
  misc_feature: n=a,t,g or c
attttaaatcatgtttattatttaagtttttatcacagtggagattaacttatgtttaatcatccaatcagtgcctactgtcaacttaatcaaattccaaaaaagtaaaatcaactcattcatacactctaagtcctcttactatcccaccattcattgcctgtgtcttttttcccttttaacggcaacatcgtaataagattgtgaaaaggtataactaataagtttctatgtatgtataataccatttcttcaagtattcagagagcagtacatttgtctgcattgtacattagaaaactacttgtgacattatttctaagtgcaggagagcagctcctgggtggggagagtaatgaagttggtttgtcatagtggtatggcccaagggatttaccagcactcnaagaatttttcacaactctttccatggttaagtgaatgacattagg

SEQ ID NO: 636 - DNA, 579 bp, Homo sapiens
  misc_feature: n=a,t,g or c
cagcagaagagtgacctgattttattcaccttttattggaaatctgtgggacagaactaggcaatgagggtgctacaataataaaggtgagtgttggcagtggcttgaccagagcagaagtgggaatgaaacagttggattctgtttgttttcaaagaagagctcatagaacttactgatggnttgttatgtaggatgtgaaagaaaaccacagaaatgactccaactaaaacagtaaaatgccattcactaatttcaagatgatgagagaagctgttttgcagagataatgaaagaaattctgtttgaagcctattaaagtttgaagtgcatattaattggactttcaagttgagatgtcaagtaagtagcagggtctctgagtatggaatacnaggctgtgggcnagtgacttancgtctgcaacatccacatataggcagcatcnccatagcaacaaacatccngttccaaataatccgccngattttcntcctccacgtccatcttcctcagagtccatcaggggccnccagnactggcnaatccacncatgngcccgttacctccttctcngca

SEQ ID NO: 637 - DNA, 370 bp, Homo sapiens
  misc_feature: n=a,t,g or c
ttaagacaaaaagatcgtttttattcacttttgattacaaaaaaaggttacatgaataaaataacaatttcctttaagagagggattcctgaatgattaaactgccaaggaaaaaagagtgaattcttccttttaataaaggtgacctaggtcctgaggaagttaggaaaaaagaaaaactcacattatacttgttaaatttgttttcaaatgtgattattaagttgttgtatttattttttgttatagacaaagcaaacccaaaaactagtctaaaaaagaattccnatgcattattaaaagagatagtaataaaatatgtattggtggtgaagaattccacaagcactcaagattggncataaccttt

SEQ ID NO: 638 - DNA, 445 bp, Homo sapiens
cacaaatctagtttttatttagaagataagattcagatagcccatataaaaactgctgttagataaagctttcaaagtacatgaataatgagtttgtaatgcaaataattattttcatttcccagtgcttgtcagatataacaaataaatgtattgggtagcaaatacaaatgtgaataccataacttatactcaaatatgattatgatcccagagcaaggaggttcagtgcataaaccagccaacgattatgctcacaaaatcaacagcaatatgtaatcagatggacccaggtctcaatcatctctgctcatgggaaacaaggtaacacacccataggtaccctccagtcttttataaatcagtagttccatcctctctcttatccaaagcctttcaccagagtgtgtgggaaaggacaggatggactaactgggaagccctc

SEQ ID NO: 639 - DNA, 375 bp, Homo sapiens
gaacattaaactgatttttaatatgctaccagcagggattcaggagagcaaactggtaatatgtaatactacatactctgtgtctccataattttactgcataaaggaaaatcttccaaaggaaaaaatcattaaacccaacagcttacagggatctaaatgcctaatacaaaatcaatggctaacctacagtagatcaacactctagttcagcactgtccaatagaaatataatgcaagctgcaaatgtaagccacataatgtaatttaaatttttctagtagccacatttaaaaagtaaaaagtaggcagtgtacagtgggcttatgcctgtcatcacaacactttgggaggctgaggtgggaggatggcctc

SEQ ID NO: 640 - DNA, 371 bp, Homo sapiens
gcatatataaataacatttattaacttaggctgtacaatatattgatttagtcaaataaaaaataccgtacacaaaaattgaagtaaaatctgtaagatgccattcagactgaattttatattctgaataagacaagggactgccattcacttaaagcaaaatggctccaattccgtttatctatctatctatctatctatctatctatccatctatctatctatctatctataagtctcgctctgtcacccaggctggagtatctatctatttatttatgagataagtctcgctctgtcacccaggctggagtgcggtggtgcaatctccggctcactgcaacctctggcctcccacgttcaagtggatg

SEQ ID NO: 641 - DNA, 336 bp, Homo sapiens
  misc_feature: n=a,t,g or c
gtngttccaaaataagacatttcattttatttctgaaatcagaataagtcggtgagagtagaaaccactaggtcgagagcaagaactctcccccaaagtggagagaatatttctccctaccctgggctgcggatccctggaaatggggcttcttcctcccacatgttctgctggcacaagtccccttgggcgggctgggctgaagtgggcagggttgggcccctttcacccacccagaaacatgggttcacttgaacgtcaggctctaggatcttcgagggggtccccagtncgctttntgacctgggcccagcaagagcacttcctgacaaccct

SEQ ID NO: 642 - DNA, 203 bp, Homo sapiens; identical to SEQ ID NO: 70

SEQ ID NO: 643 - DNA, 401 bp, Homo sapiens
  misc_feature: n=a,t,g or c
ttaacagntnncagcaacttttatagaaaaggtggttggctctgaaaagacnttntgggttttggttagcacacattcacaagacaatttacgccctctccccacgaatgcggcganaagctggatgtccttgggcatgatagtcactcgcttggcgtgaatggcgcataggttggtgtcctcaaacagccccaccaggtaggcctcgcaggctnnctgcagcgccatcaccgccgagctctgaaaacgcagatcagtcttgaagtcctgcgcgatctcacggactagacgctggaatggcagtttgcgaatcagcagctcggtcgactttctgggtagcggcggatctcgcgcagagccaccgtgccgggccggttaacgtgggggcttcttcacgcctt

SEQ ID NO: 644 - DNA, 408 bp, Homo sapiens
  misc_feature: n=a,t,g or c
gcaacatttattgaaacttatattagtcaagcaacttaatgctaggctaagctgcagtgagtaataatccctaacctcagtgacagtgcagaaaaagaagggtttcatatctggagtgtgatgcaggtcaatgggagtttccttcacctggtgactcaggtatccaggcacattcatttctgcaggtctgccttcttgacatgaggtcactgcagaaggagagagggtntagagtcatgccagttcttagggtgctccctgacaaggagatcctgcagcactctgcttcacattcctgtttttccagaactcagcccagtacccccaccanaacttcccaaagagtcttggggaagcataggaggaggttcaccagataggcctnggagatcccctcatcactttttg

SEQ ID NO: 645 - DNA, 358 bp, Homo sapiens
aattattactttttattaatttagagcatttgaagtataaaaataaaaggcttttgacatactgtatatacatacatagccttctgttgtacatcctttccaacgtgttttttaaaatttatatttcagtccaatattcaataaaagggtcattaaaaacaaaacaaaattgtgaaaaaaaagaaataagaatgtgtctctgttgcacaactgcattctatccttgcaggtaatattcttacatccaatgagagcgctgcctgcatagaggtcatgaaattgaacctttaacctctccatgtggatcagatagaaaaggatttctgaagagtgcatttgccagtttaaaagcaacact

SEQ ID NO: 646 - DNA, 447 bp, Homo sapiens; identical to SEQ ID NO: 82

SEQ ID NO: 647 - DNA, 438 bp, Homo sapiens
  misc_feature: n=a,t,g or c
aaggataatgaaaagaaacatttatttacactttgtacatatcgattccaacaaacaataaaaggcctacacatcagtgtaatcataatatatgcgaacttccgatcttctcacactttgcagtgatctgatgctttcactcctggttctgatatttgattttttgaacagccttcttgaaaatgacctacacatgaaaaagtaaattattggatccaggcaaacattacacgcagacaagaaaagtgtaatttctttgcagtaatataggattttttgtgcagattcatctaaaagcctgtcctaagtgactaaaagtaaaaggaattctgcacaagtgatacggtagaaagcaggtaaaaaacacagccacaacaaccctgatgctctggttatgttttcgctttcggcttgactgacttatgaattgcctgcngg

SEQ ID NO: 648 - DNA, 410 bp, Homo sapiens
  misc_feature: n=a,t,g or c
ttgagtgaatgaatgaaaattattttatttttatttgagctttggttctgccatttgctagcagtgtgactcaagagaagccagtaacccccctgagcttccctagttcacaaaatgcttgtcatgaagtcgacagcttccggagctgcgaggctcnaagaaatgcccacatgaatgtgcgcttagggcgtgagtgctcactccagaaaactccaacacagtgaaaatggcagaagcggtgtttttcttttttacatttttataagaatatataaaaaatgatataaatggacatttacggtagtgggggaaggcatatatctacgttaaaaggcaggacatttttaaaagctctattttctaaatgaaaactacgaaagcggggtgggttgtggcgggggcagttgtgg

SEQ ID NO: 649 - DNA, 459 bp, Homo sapiens
  misc_feature: n=a,t,g or c
ggctgctgctccttgctggcgggctgcccctgcgcgctcctgaccctctgcagtctctccaggtgcagcgtcctcagatcaggctggtctgggccacgctgctccctgggaggctgctctgtctgcgcaggggtagggggcactggctggagaggggctgggcaccggtccctgctgggggtcccagggctgctcggggtcgcggggccctcttgctcacagtgatgaacctcctcttcccttccccggaactgtcgtgcctcagcccgtgctcctcggctatttggtggacccgcagcctgtcgtgggaattgagggaaggaggaaactccaacttgcatcttcttgctggccatgaacttccactatcatgggcccggaagtggtccacgccaatcttggctctccacttcctctggggcttgcctccgttgaagcttggggctgagatggancttc

SEQ ID NO: 650 - DNA, 338 bp, Homo sapiens
cttggctggttctttgttctgtcccccatgctctgatgcagtgccctcttcattttcatcttcaccatcctctcgaagaaccatgtctaggatgtttcctttgatcttgaagtctcgtgaggtgctgagcttcatgtgctgcatcaggttcaccttggacttcttagaaaggtggatgagaaatttttcatactgttctatggcaaagatgaggttagggattggcttggtttcccgaagaactctggccatggctgtggcaacggcagcaggtttctcctttttctctcccgtatagttcaggctcttactcttattctgtacgtaagaaatgaaag

SEQ ID NO: 651 - DNA, 478 bp, Homo sapiens; identical to SEQ ID NO: 19

SEQ ID NO: 652 - DNA, 361 bp, Homo sapiens
gaattttcaattagttaatttcataagctacagcagaggcgtggaccctgccctctccacacttgaagagataagcccctgggatccaagtcccagcaaggttggtgccacccatcttggtgaaagatgctgttgttcctgtggaaaccatcaccagaggtaggaagggctttgagcccaaaaggaaacaagagggcgtgaatccaggccatcctcaggggagggtgggagcccatcccaggcagagaggcctaagcctcagtgtgggccaaggctcaaaggtgctggcacaaggcttcccagggggagaatcagaaactcagcagtgaaagtccgcagaagggggaagaagcaggctgat

SEQ ID NO: 653 - DNA, 409 bp, Homo sapiens
agagattttcagaaataattttatttacagaaaattcacagaggattaataaaatgtcatgaatacaattttgttggtaataattagcagaatcaagagtagattaatatataaggtaacatgatatattaataatacaaactaaaatatcaattttatgctagctttatccattagtttttcatattccaattttaaacaaatctagaaataagacagtatatatgaaacaaatttgctaaatatttttaaattatgccacctcagatattacctcaattttaaaaccatctgtaaattaaatgaccttcccattataatttctaaatataaagaagcaccagctggaactcaaaatgcataaaagatattgttatatattttaagaaaatattatattagcaatatc

SEQ ID NO: 654 - DNA, 589 bp, Homo sapiens
  misc_feature: n=a,t,g or c
attcagatgatcttttatttgaggggaaaatgtatgaccgtcactacaagaagctaatcattttcatttaaatggatgatttaaaactaagaagttttcaagaatttcagactacaataaaaaaattcagatttaaatcctgctttccatagcttcaatcctaaaccaagagagtttcaggaattttagataaagcaaagataaattaaaataaaccgttacaacaacctagccatataaaaaggcagtgaccagatagaaagagaagcctttccgtggatattttctccaccaattgcatacggtaaattttcctaaggtaattactttttgcaaaaccaatccaaatgaagacaggagggaaattctcgccttaagcttccccatattgagtttagggccatgatttccaaattgtgtaacaaaggagcttcttctgagggtgatcgggaccaacaggggccatgagaatcattcaaggacaaagccacttgcttccaaagagctgcnaccatgatagcctggtttctggattccaaccgaggattggcaatgtatgcagtaatttttaaaacctggaaaacatttc

SEQ ID NO: 655 - DNA, 341 bp, Homo sapiens
  misc_feature: n=a,t,g or c
cattttaaaaaaaggaaaaagttttattacgaaactagtttgtataaaacagggttatacatatttttgtaagtttgtaataaaacagtaagaaaaaaaaggcagtaatagaaatctccaaaaggcaacctatcaaaaccaactggctgccactttgagtttngncagtagctgcataaactttgttcttcttgaacagtatttaataacatcattaatacattancaacatttctataaagtaagacacattggtgctgaagtacaactggtggcctcttgatctcacctatgaggagagttctttacaaaaccacatagggaaaattgcagttgtaagg

SEQ ID NO: 656 - DNA, 226 bp, Homo sapiens
caagacatgggaccctgaagtgctttattatcaggacttattggaagggtttcccagttgcttccaggcaggtgagttgatttgggggtccagttcttcaaatctgtgaggctttttctttctaatgtctgagtcccctgaggagaaaaaaatcaaatgggagcccacaagttcaggtctttcttgtaaatcaggcagtttttagtagacttcccaataggcttcc

SEQ ID NO: 657 - DNA, 183 bp, Homo sapiens; identical to SEQ ID NO: 21

SEQ ID NO: 658 - DNA, 371 bp, Homo sapiens; identical to SEQ ID NO: 23

SEQ ID NO: 659 - DNA, 335 bp, Homo sapiens; identical to SEQ ID NO: 25

SEQ ID NO: 660 - DNA, 464 bp, Homo sapiens
cttcccaaacaaaaatagatgggtcactccctagaagatctctggcaggttcagtctgagatctctgggagtcaggagcgctgctctcatccccaatcagggcctcatagaaagctcgggctgcagccgcatccagggtggactctggcttctcgggctgtggctgctgctgcccatccttccagaggtcgctggggtcagtggctggggtgaaggtgatgagcaagggccgggacatggcttttgggagaactgagaaaatgataccaggcaagggaaggatgagacaagtaagccaagctcgtggtgaccctgtagcaaccacagcctcagagaccagtaggaaaaaaaaatcagcctggccctttaagtcttccgcgatcccatttcggagtttcctcttcccaaacaaaaatagatgggtcactccctagaagatctcggggagagtctctatacgtgtt

SEQ ID NO: 661 - DNA, 425 bp, Homo sapiens; identical to SEQ ID NO: 26

SEQ ID NO: 662 - DNA, 255 bp, Homo sapiens; identical to SEQ ID NO: 27

SEQ ID NO: 663 - DNA, 348 bp, Homo sapiens
tttacaaaaatattttcatttaataaacgtctttgcatgtcacatttaatgggaaacaaaatatcatgttaatagcctagtaatacaattttattaaagtcagtataagttgaaaagtttatcagtgttaataagaatgaaaaatatgtacaatatgcaattactattaaatacaatttgcccatagttgcacattgaattcattatcacggcagttaaatatcagagcttctggtttctcactcttcattcatgtattcagcaaccatgtgctaaggtactaggacaagcactggaattaccagataaagatgatatggtccacccctcaacaactgtttgctataa

SEQ ID NO: 664 - DNA, 446 bp, Homo sapiens; identical to SEQ ID NO: 28

SEQ ID NO: 665 - DNA, 415 bp, Homo sapiens
acagaaaacgaaggcgactattttattagaaaacaaaggctatatgttaatccatcaccagatacgacaatgcttaccaaagaactgtaaaaaattggtctaaaaacagaaaaaagcacaacgacagacgcatggtatagcacacctctaggaagcctgcagccctcactggaaataaacacatacccacacacacatatgtacaggtttcataagcaaagatgtctaaaacagattgtaagagaaagataaacactcctacatgtatatgtgtgcacattttccttaaaaacacataacatgcttttccttcattttactcagctctgagaaattcccgatacaaaactattccatgcctcatactacagataggatatcataaagcaaaagtctacattttcctaggagctgt

SEQ ID NO: 666 - DNA, 410 bp, Homo sapiens
agattttgctacaccttttattattttaaatatagatcaatgaattacatcaaaactacaagcaacaattagtataaataatactttaatcagtggcagcaaaacattggtcaattctattaaaaaagcatctcgtgtgaacagacatcatgggctgactgacagtgtcatctcccaacaaaaggctgcgatggacaaagtgagatgggagtcagaggagcaatgtcctcagcaaacacttcactctccccctcccccagtcaggaccccaacacggtttttgtttttgtttttaaaacaccaacacaaacacttctggctcatatttaaaggaacaaactggaaacaaataatagcaaatgggcattggagcttttccacacctagctttctccaaagcacgttctcag

SEQ ID NO: 667 - DNA, 526 bp, Homo sapiens
tttttttttacatggaaatattccatgggatttatttttaacaaacatttacataaacaataaatgaaaaaaaaacaggtttaaagtgagcagattcatatttacagtgtgatttttaaggactgtctatatccaaattttattttcgtgaacgcttacattctaagagcagtacaattagcctattacgtagggccctaatcttgttagtatagtgttgttgaaatactttcttcagcttttgccttaacaaatccaaagatggaagatgatgacaatctggaatattcaacataacatgaaaaaattcattccacatatccaaatgaggaagccttctaaaaagaccttcaggcttacactctcctccttcatttttcactttcatgtaagtgccaaagagcatgcaatatactgttgcagcaaccccaaagtaatcgatctggtagttccatggtttgttgctgagcatctcaacacactgaaaaccagatgtttcacactttgctgtgaatatagttccttt

SEQ ID NO: 668 - DNA, 454 bp, Homo sapiens
tttttttttggtattataaagacatttatttaatctatgaaaataatgtacaataaatactttccccttttcctattattaaagaattttaataaataatctacagtctaaaacataaaaaagaggaaaataggtccctctagttatttttaagaaagtccccctagagtttaattattcctgagatttcattggaaggagtctaccaaacggaatttttctgtgtgaattttaaaagataaccgagtgcccaatattttagaagaagaagaaagggagtggattaaacgctaattcagtaatacctgaattttagcaaaacacataagtctatgcgactgagggtgggagaggctcgatttttccagtagacggccaaggagcgcgggggtcgaaaggaccgggaggaggaaacaggttagggaaacttcaggtcgatggcacagagcgtact

SEQ ID NO: 669 - DNA, 361 bp, Homo sapiens
ccttatcaggataaaatgtttatcagtattcaaataaaatatcttaaatggaaagagacaggaaagaacatggttaaatcacagaaaatgaagaaagggagaagctgatcatgatcttgtacaacattatgacagcactaaggtattacgtatccaatacaaggatacttaatagaccaaagaatttaaaatcccagggaactggaataaccagccacaaaagaggcctctctttgttgtggttcacaacacaaaaggccatcaacaaattaggaaatattaaaattaagagagcagcaggtttcttcttggtagacagctcatgctaccatccacaaagtgagcagtggaaggggtattt

SEQ ID NO: 670 - DNA, 381 bp, Homo sapiens
gacagtgtgaagaatgtaagtcgaaccttatctccttccttacatttcattgtgtcctcgtttctaacccccagtacttccattttcccagtgttgtcacttaggtcaaataatatgtttttcttcttttctgttaccttctggactacaaacaaaccattcacaattgttccaaggggctgagtttgaagcgtgttgatcttcggggtttcaccagcttttcttcttgggtctcaaacgtgaagggcttctttgctttcagtaccataactggcaaacagcgcttctgaaacccttctctgatagattcctgctgggccaccatctgtttctgttcaggcttaacatgaggagagacttttggtgcagcacgttgctttg

SEQ ID NO: 671 - DNA, 395 bp, Homo sapiens
ttttttctggtacccaaagtgtcctttattctttatcatcctatttgagttttattgtttttacacagctgggaaatgcttaaggtacaaattaataaattttaaactcagtatggaaaatacatttaataaattaaagcaaaaaccaaagatctgaggagatccaagagatcaagacaatctgtaaccagagtctgaagtatccaaggagctactctttttgaggcatattctcctcagcttccagttatcatttgataaacacatcagcaaaaggttcagtgttttaaacaaatgtagactttattttgtactgtacaaagtgctaatgtcagtagatccattaaaatatagaatatttaagaaagatcattaataaaagtaatggtcattca

SEQ ID NO: 672 - DNA, 436 bp, Homo sapiens; identical to SEQ ID NO: 33

SEQ ID NO: 673 - DNA, 510 bp, Homo sapiens
tttttttttttcctgtttttgtttttactggaggctcaggtggcacatgacagatcataaaatggcttcagaggtagggggccgggggaaaacaaaaataaacttggggtgggggcaagaaaagcaaccaggaggaggtaagagctggctggttccttctcagcctgagttacgggagggagttgctgtctctgaacagtaaggatggctcccttccttcaacccttgataaggggagggaagaaaaaagaaaaagcaaaaggctgctgctttggtcctcctgagtctcaaggaaaaggtgaaaagctggtgttttgatgtcatgaattatgggaaagggggagcagggtactgggtagggtacaggtcatttggaaaaactggcagataccagatggcagctctgggtgtcctttgagttgagttggaatcactccaggatggtggtggtggggtcccactgttgacaggggctgaggtctcaggggctgcgggctgccgggggccagg

SEQ ID NO: 674 - DNA, 312 bp, Homo sapiens
tctgtaatcgactttttattaagattataaatttaaacaatctgaacagttttacccggtgatatacaattcagtatgcacaaaaatacagggtaatgagggaaaagggccgagaaaggaaggattggcaactcgttttggagtccacacggtgctgatggcagagaaccagaggggctgcagacgaaccccacctttttacaacaaaaggcttttaaattaaacaaatctatcgagctgaagacacaggacggggttctcacaggctcgaacaatgctggtttcatgaaatgcaaccgaaggctgaaccaa

SEQ ID NO: 675 - DNA, 336 bp, Homo sapiens
  misc_feature: n=a,t,g or c
ctgacagcaatagattnntaagtatccccgaaaatataaacacaaaccagtaaaaaacaaaaccgtaaaacgtcaggcctggagctgcaataagacagagacaggagcagctcacacgbggcctaggtggggaggacgaggccataaatactgcaggagggcggcaagggagcccyagggcgaggggaaagcagggtgtcggcagcaagatggctccgggggtttagacactgctggcttcggcccggcgccacctgcctctcactccagctgcgagcagcttcactyggggcctgggctccgactcctcctcgtcgtcttcgtacatctcgccct

SEQ ID NO: 676 - DNA, 251 bp, Homo sapiens
aagtaatagtacttttaataaaattaagttcttaatagcacatttaatacattaaccctcccccttcttggtttctctgcattttgtgcaacatcactttgacttgattattcttgggtctgttttatttcccgcttttattttgcttttgaaatctttttccttggtggatttgtacgtgtcttcactagatgcctcaaattaagtctgaccacaattctactctactttctacagtggagagaccatcc

SEQ ID NO: 677 - DNA, 408 bp, Homo sapiens
  misc_feature: n=a,t,g or c
natattttgtattggttttatttaaattttacagaaacctgancagagttaagtatgtaattataagtccagtaacaatttctacaaaaatgcacatacaatgccaganctccttaaaagcaactaatatcatatttgtgttttgcataaaacatgcattaatatgttggccaaaatcagtctctacaagaagagacagtccaatacagtcaataagacanctagttgtgancaacaggtaaaacaagaggtttccagttaatgtgaaagangggantaggtacctttcataaaacaaggcccttcaggcgnctgaggttaactgancgggtactattgtgnctggcacggtaatgtaacacatcacctccaggacttggggncccgattgggtctaggggaggtagg

SEQ ID NO: 678 - DNA, 505 bp, Homo sapiens
  misc_feature: n=a,t,g or c
tttttttccctgcacacacactttattttgtcctctctgagcccttctcacttccccctcaggacggccaccccttggcatcgggtgcaganccccatccagccgcggtgagggtggctgtcatccggcgggtcctcaccctggtccctaggcttgcgcaagctgatgggtctcatagtcctctgggatggtgtcattgcagcggtaacagggttggcccagatgatgttctcctgggagaagcagaagacccccaggcggccaccccgcatggttgtgtccaagaccacgttgctgtcggccaccagctcagggccctcatagaatcgcaccctgatgtagcccacttgggnccgggtgctgcaggaaccaacgataggacttcttgtccttccaacccacgtttcgcgggtccttccacagcagccgaacctgggaatctgtgtctcctgtatgcaaagaagcgtttcgaagctgttnccggggcctgtggaanaattnaaag

SEQ ID NO: 679 - DNA, 455 bp, Homo sapiens
  misc_feature: n=a,t,g or c
ttttttttttaatttcaaagatacatgaaaatcgttttatttatttaacaaacacaaacaattgaacaaacaatggaagcaagtccttttgcctaaaggaacacagagggtcatgcggatgttgctcctccaaggatttcggtgttccccaacggctagttttgggtctagttcttctggaagatcttattcttggggagctacaggttctggcgtttggggctctttcaggttctatctccattttcccctcaattcctccccattctgctataataaaaaaaaattctcacctccggaagatcccgcctgtgcctccccgccagcctttcaggagggtctggacgtctggtccacccgctccccgggcttctttccccagcttttgctttttnccctcccctggctccccgccctncgggcctcagggaacccgancaaccgnccagcttgag

SEQ ID NO: 680 - DNA, 596 bp, Homo sapiens
  misc_feature: n=a,t,g or c
canttttactcttttgtccatcgtttcattggctgcacacgcaacatttttgcttgtgttctaatgagtttcaatgtgtacagtactttctttttctttatcctttccctctaacgcttctaaatctcctgagtcacttggaagttttttctttttcatttccctgaataaaaaagacatgaaaaaatttcattcttagaatttgaaattcttagtgccctaaaaaagttccatggggaaggcacatatacagtatataaatggtcatggcttctgcttcacttgataatcaccaagttagaaaatacaaagatgcttaaaatcatcatgtggggaaaaagatgcaagtttttcatctctcatgggatttatctttctttccatcatccaagctcaacatattgtcacccctgactcatcccttactcactagggnccattttgcccntgatcacccttgatgnccagggtctggggntttggaggcctttgtcccacattggattgggagggcttggggatccaataaaccacctgttnccgggttgggtgcctaatgggttaaaaatcccaggntttggtggggnggggttacc

SEQ ID NO: 681 - DNA, 349 bp, Homo sapiens
  misc_feature: n=a,t,g or c
gctgcgggctaacgtttatttgccagccaaggccccgggncgcctggnttctgctcagaagatcctcacggagtccagctgcacgtccccgcccacctccaccaggcgcacncngcacgcggcacngcggntggcggaagtnggtggtactgggcgtccccaaccacggccttgaagccgtcgtctgacgcgatgatgagcacctcgaagggctgcccgcgctggaaaggaacgcccggcccgcgctcctcgcgccccaggagccttgctcnttgctgttgaagaccacctccgacgtgtccagccgggggttgaaatgcagggcggcatcggaaccctggtcctcccc

SEQ ID NO: 682 - DNA, 403 bp, Homo sapiens
gtgagaaacaaacagtagaaaaaaaattgaatttatttggctaactcaataatatgaacagcaggaaagatagacacatataaaatgttttggacttggtttgctaagttgatacagataaaatacgacagtaactagaagattacttgagaaactgttaattgaatgagacagtctggatatagtaactatcaatttttccaggctgtataagttagattatcaggagccacatacttgaactcttatctttttagtcaccagaaaaaaaaaaatgcccttgcttcctcatagttagaggcagtgtagcatagtgggtaggagtgcagactgtggatccagacatcctaagttgaaatcctagctcttctgctttctgctggtagtatctgagggtccatca

SEQ ID NO: 683 - DNA, 425 bp, Homo sapiens
  misc_feature: n=a,t,g or c
tttttgcgggctaacntttatttgccagccaaggccccgggccgcctggnttnctgctcagaagatcctcacggagtccagctgcacgtccccgcccacctccaccaggcgcacngccacgcggcaggcggtggcggaagtggtggtactgggcgtccccaaccacggccttgaagccgtcgtctgacgcgatgatgagcacctcgaagggctgcccgcgctggaaaggaacgcccggcccgcgctcctcgcgccccaaggagccttgctctntgctgttgaagaccacctccgacgtgtccaagccgggggttgaaatgcagcncggcaatcggaaccctgcttcttccccggacaacaaggttttacaatggaaacttgtnggcaatttgggaggaaacaaagccgcgaatttnttaagcaac

SEQ ID NO: 684 - DNA, 406 bp, Homo sapiens
  misc_feature: n=a,t,g or c
tnncagatttngcagcacttttaatacacaaagcaaaaggtaataggctggatgggtnaccaaccttcattcacatanagagnccaagtatagatacagactaattgggaaataagttagagtttgnagggccttagggtcgagagcagaaacactctccttttggcagccatggaagcnnnnanttccttttctggtntcagtgcatgtacgccttcggtcgctccatagcctggtgtgcctgcagcacggccactgcctcgtctatcttggcatggacgggattctggagactccagcatgagcaacagctccgagttgtcaatctccagcagcatgcccgtggatcttgccagccagctggggtgtggacatcatggataaaggggggtagagacgctnccca

SEQ ID NO: 685 - DNA, 2493 bp, Homo sapiens
ggaggcgaactgtgggccccggccattcattgccgtggccggcgggcactggggccccgtgttttcagagtcatggaggcgctaattcctgtcataaacaagctccaggacgtcttcaacacggtgggcgccgacatcatccagctgcctcaaatcgtcgtagtgggaacgcagagcagcggaaagagctcagtgctagaaagcctggtggggagggacctgcttcccagaggtactggaattgtcacccggagacctctcattctgcaactggtccatgtgacacaagaagataaacggaaaacaacaggagaagaaaatggggtggaagcagaagaatggggtaaatttcttcacaccaaaaataagctttacacggattttgatgaaattcgacaagaaattgaaaatgaaacagaaagaatttcaggaaataataagggagtaagccctgaaccaattcatcttaagattttttcacccaacgttgtcaatttgacacttgtggatttgccaggaatgaccaaggtgcctgtaggtgatcaacctaaggatattgagcttcaaatcagagagctcattcttcggttcatcagtaatcctaattccattatcctcgctgtcactgctgctaatacagatatggcaacatcagaggcacttaaaatttcaagagaggtagatccagatggtcgcagaaccctagctgtaatcactaaacttgatctcatggatgcgggtactgatgccatggatgtattgatgggaagggttattccagtcaaacttggaataattggagtagttaacaggagccagctagatattaacaacaagaagagtgtaactgattcaatccgtgatgagtatgcttttcttcaaaagaaatatccatctctggccaatagaaatggaacaaagtatcttgctaggactctaaacaggttactgatgcatcacatcagagattgtttaccagagttgaaaacaagaataaatgttctagctgctcagtatcagtctcttctaaatagctacggtgaacccgtggatgataaaagtgctactttactccaacttattaccaaatttgccacagaatattgtaacactattgaaggaactgcaaaatatattgaaacttcggagctatgcggtggtgctagaatttgttatattttccatgagacttttgggcgaaccttagaatctgttgatccacttggtggccttaacactattgacattttgactgccattagaaatgctactggtcctcgtcctgctttatttgtgcctgaggtttcatttgagttactggtgaagcggcaaatcaaacgtctagaagagcccagcctccgctgtgtggaactggttcatgaggaaatgcaaaggatcattcagcactgtagcaattacagtacacaggaattgttacgatttcctaaacttcatgatgccatagttgaagtggtgacttgtcttcttcgtaaaaggttgcctgttacaaatgaaatggtccataacttagtggcaattgaactggcttatatcaacacaaaacatccagactttgctgatgcttgtgggctaatgaacaataatatagaggaacaaaggagaaacaggctagccagagaattaccttcagctgtatcacgagacaagtcttctaaagttccaagtgctttggcacctgcctcccaggagccctcccccgctgcttctgctgaggctgatggcaagttaattcaggacagcagaagagaaactaaaaatgttgcatctggaggtggtggggttggagatggtgttcaagaaccaaccacaggcaactggagaggaatgctgaaaacttcaaaagctgaagagttattagcagaagaaaaatcaaaacccattccaattatgccagccagtccacaaaaaggtcatgccgtgaacctgctagatgtgccagttcctgttgcacgaaaactatctgctcgggaacagcgagattgtgaggttattgaacgactcattaaatcatattttctcattgtcagaaagaatattcaagacagtgtgccaaaggcagtaatgcattttttggttaatcatgtgaaagacactcttcagagtgagctagtaggccagctgtataaatcatccttattggatgatcttctgacagaatctgaggacatggcacagcgcaggaaagaagcagctgatatgctaaaggcattacaaggagccagtcaaattattgctgaaatccgggagactcatctttggtgaagagaactatgtaatactgagactttgttgactcaaaacttgctagttactgcctacctgagtagaatcttatttatgaactcctgtgtattgcaatggtatgaatctgctcatgtggagactggctataaactgaaaagtgtattccaaattgcagaacacatcacacatttaatccaaataataaatggctgtttctaaaaaaaaaaa

SEQ ID NO: 686 - DNA, 2108 bp, Homo sapiens
gattccggcagtgacagcagtgaggatgatgacgaaggcgacgaggagggagaggacggagcccttgatgacgagggccacagtgggattaaaaagaccactgaggagcaggtgcaggccagcactccttgcccgaggacagagatggcgagcgcccggattggggatgagtatgcggaggacagctctgatgaggaggacatccggaacacggtgggcaacgtgcccttggagtggtacgatgacttcccccacgtgggctacgacctggatggcaggcgcatctacaagcccctgcggacccgggatgagctggaccagttcctggacaagatggacgatcctgactactggcgcaccgtgcaggacccgatgacagggcgggacctgagactgacggatgagcaggtggccctggtgcggcggctgcagagtggccagtttggggatgtgggcttcaacccctatgagccggctgtcgacttcttcagcggggacgtcatgatccacccggtgaccaaccgcccggccgacaagcgcagcttcatcccctccctggtggagaaggagaaggtctctcgcatggtgcacgccatcaagatgggctggatccagcctcgccggccccgagaccccacccccagcttctatgacctgtgggcccaggaggaccccaacgccgtgctcgggcgccacaagatgcacgtacctgctcccaagctggccctgccaggccacgccgagtcgtacaacccaccccctgaatacctgctcagcgaggaggagcgcttggcgtgggaacagcaggagccaggcgagaggaagctgagctttttgccacgcaagttcccgagcctgcgggccgtgcctgcctacggacgcttcatccaggaacgcttcgagcgctgccttgacctgtacctgtgcccacggcagcgcaagatgagggtgaatgtagaccctgaggacctcatccccaagctgcctcggccgagggacctgcagcccttccccacgtgccaggccctggtctacaggggccacagtgaccttgtccggtgcctcagtgtctctcctgggggccagtggctggtttcaggctctgacgacggctccctgcggctctgggaggtggccactgcccgctgtgtgaggactgttcccgtggggggcgtggtgaagagtgtggcctggaaccccagccccgctgtctgcctggtggctgcagccgtggaggactcggtgctgctgctgaacccagctctgggggaccggctggtggcgggcagcacagatcagctgttgagcgccttcgtcccgcctgaggagccccccttgcagccggcccgctggctggaggcctcagaggaggagcgccaagtgggcctgcggctgcgcatctgccacgggaagccagtgacgcaggtgacctggcacgggcgtggggactacctggccgtggtgctggccacccaaggccacacccaggtgctgattcaccagctgagccgtcgccgcagccagagtccgttccgccacagccacggacaggtgcagcgagtggccttccaccctgcccggcccttcctgttggtggcgtcccagcgcagcgtccgcctctaccacctgctgcgccaggagctcaccaagaagctgatgcccaactgcaagtgggtgtccagcctggcggtgcaccctgcaggtgacaacgtcatctgtgggagctacgatagcaagctggtgtggtttgacctggatctttccaccaagccatacaggatgctgagacaccacaagaaggctctgcgggctgtggccttccacccgcggtacccactctttgcgtcaggctcggacgacggcagtgtcatcgtctgccatggcatggtgtacaatgaccttctgcagaaccccttgctggtgcccgtcaaggtgctgaagggacacgtgctgacccgagatctgggagtgctggacgtcatcttccaccccacccagccgtgggtcttctcctcgggggcagacgggactgtccgcctcttcacctagctgttctgcctgcctggggctggggtggtcgtgctgaagtcaacagagcctttaccctg

SEQ ID NO: 687 - DNA, 40392 bp, Homo sapiens; identical to SEQ ID NO: 44

SEQ ID NO: 688 - DNA, 1537 bp, Homo sapiens; identical to SEQ ID NO: 51

SEQ ID NO: 689 - DNA, 2750 bp, Homo sapiens; identical to SEQ ID NO: 52

SEQ ID NO: 690 - DNA, 3254 bp, Homo sapiens
ggggaggaaacgagctggagcagcatctcatctaccctccttgacacctccccgtggctccagcaagccctagaggtcagccttgcggaccaacaggaggactcccagctttcccttttcaagaggtaccccagacaccggccaccctcttccagcccctgcggccagtgcaaggaggcaccaatgctctgaggctgtcgcgtggtgcagcgtcgagcatcctcgccgagtccttctgctgcctgtcccgcctcaccccgctccatcacaccagctggccctctttgcttccttttcccagaatcgttaagccccgactcccactagcacctcgtaccaacctcgccccaccccatcctcctgccttcccgcgctccggtgtcccccgctgccatgagctcccccatcagcaagagccgctcgcttgccgccttcctgcagcagctgcgcagtccgaggcagcccccgagactggtgacatctacggcgtacacgtcccctcagccgcgagaggtgccagtctgcccgctgacagctggtggcgagactcagaacgcggccgccctgccgggccccaccagctggccactgctggcgagcctgctgcagattctctggaaagggggtctcaagaaacagcacgacaccctggtggagtaccacaagaagtatggcaagattttccgcatgaagttgggttcctttgagtcggtgcacctgggctcgccatgcctgctggaagcgctgtaccgcaccgagagcgtaccccagcggctggagatcaaaccgtggaaggcctatcgcgactaccgcaaagaaggctacgggctgctgatcctggaaggggaagactggcagcgggtccggagtgcctttcaaaagaaactaatgaaaccaggggaagtgatgaagctggacaacaaaatcaatgaggtcttggccgattttatgggcagaatagatgagctctgtgatgaaagaggccacgtcgaagacttgtacagcgaactgaacaaatggtcgtttgaaagtatctgcctcgtgttgtatgagaagagatttgggcttctccagaagaatgcaggggatgaagctgtgaacttcatcatggccatcaaaacaatgatgagcacgtttgggaggatgatggtcactccagtcgagctgcacaagagcctcaacaccaaggtctggcagggacacactctggcctgggacaccattttcaaatcagtcaaagcttgtatcgacaaccggttagagaagtattctcagcagcctagtgcagatttcctttgtgacatttatcaccagaatcggctttcaaagaaagaattgtatgctgctgtcacagagctccagctggctgcggtggaaacgacagcaaacagtctaatgtggattctctacaatttatcccgtaatccccaagtgcaacaaaagcttcttaaggaaattcaaagtgtattacctgagaatcagaggccacgggaggaagatttgaggaatatgccgtatttaaaagcctgtctgaaagaatctatgaggcttaccccgggtgtaccatttacaactcggactcttgacaaggcaacagttctgggtgaatatgctttacccaaaggaacagtgctcatgctaaatacccaggtgttgggatccagtgaagacaattttgaagattcaagtcagtttagacctgaacgttggcttcaggagaaggaaaaaattaatccttttgcgcatcttccatttggcgttggaaaaagaatgtgcattggtcgccgattagcagagcttcaactgcatttggctctttgttggattgtccgcaaatacgacatccaggccacagacaatgagcctgttgagatgctacactcaggcaccctggtgcccagccgggaactccccatcgcgttttgccagcgataatacgcctcagatggtggtatttgctaacatcatatccaactcagggaagcggactgagtgctgggatccaaggcattctacagggttcactgctggtttacacttcacctgtgtcagcaccatcttcaggtgcttagaatggcctgggagcctgttctgtcttgcatcttccatgacatgaaagggaggctggcacttgtcagtcaggtagaggttacaaaccgtttcaggccctgctaccacattcactgtttgaatctttaattcccaagaataagtttacatttcacaatgaatgacctacaacagctaaattttctggggctgggagtaatactgacaatccatttactgtagctctgcttaatgtactacttaggaaaatgtccctgcttaataatgtaagccaagctaaatgatggttaaagttatcaggcctcccatgaaattgcgttcttcctgcattgaaataaaaacattattgggaaactagagaacacctctatttttaaaaggactttaacgaagtcaaacaacttctaagactagtgattcactggggcattatttgttagaggaccttaaaattgtttattttttaaatgtgattcctttatggcattagggtaaagatgaagcaataatttttaaattgtgtatgtgcatatgaagcacagacatgcatgtgtgtgtgtgtctgtgtgtgtgtgtccgtgtatgtgtgtgtgggttctaatggtaatttgcctcagtcatttttttaatatttgcagtacttgatttaggatctgtggtgcagggcatgtttcaaagtttagtcacagcttaaaaacattcagtgtgactttaatattataaaatgatttcccatgccataatttttctgtctattaaatgggacaagtgtaaagcatgcaaaagttagagatctgttatataacatttgttttgtgatttgaactcctaggaaaaatatgatttcataaatgtaaaatgcacagaaatgcatgcaatacttataagacttaaaaattgtgtttacagatggtttatttgtgcatatttttactactgcttttcctaaatgcatactgtatataattctgtgtatttgataaatatttcttcctacattatatttttagaatatttcagaaatatacatttatgtctttatattgtaataaatatgtacatatctaggtatatgctttctctctgctgtgaaattatttttagaattataattcacgtcttgtcatatttcatctgtataccttcaaattctctgaaagtaaaaataaaagtttttaaatatt

SEQ ID NO: 691 - DNA, 2894 bp, Homo sapiens
ggagaccgcgtctgcttcaacttgggccgtgagctctatttctacccaggctgctgtcgtcgtgggagccaacggtccattgacctcaacaagccaattgacaagcggatctacaagggcacccagcccacctgccacgatttcaaccagttcactgctgccaccgagaccatctcgctgctggtgggcttctcagcgggtcaagtgcagtacctggatctcatcaaaaaggacaccagcaagctgttcaatgaggagcggttgatcgacaagaccaaggtgacatatctgaagtggctgcctgagtcggagagcctgttcctggcatcacacgccagtggccacctgtacctgtacaacgtcagccacccctgcgcctcggccccgccccagtacagcctgctgaagcagggcgagggcttctctgtctatgctgccaagagcaaggcaccccgcaacccgctggccaagtgggcggtgggtgagggtcccctcaacgagttcgccttctcgcccgatggccggcacctggcctgtgtgagccaggatgcgtgcctgcgcgtcttccacttcgactccatgctcctgcgtgggctcatgaagagctactttgggggcctgctgtgtgtgtgctggagccctgacggccgctacgtggtgacgggtggcgaagatgacctggtcaccgtgtggtccttcaccgagggccgcgtggtggctcgaggccatggccacaagtcctgggtcaacgctgtggcctttgactctctctacaccacaagggcagaggaggcggcgacagcagccggtgctgatggggagcggagcggcgaagaggaggaggaggagcccgaggctgcgggcacaggctcggccgggggcgccccactctctccactgcccaaggctggctccattacttaccgctttggctcggcgggccaggacacgcagttctgcctgtgggacctcactgaagacgtgctctacccgcacccgcccctggcccgcacccgcaccctccctggcacacctggcaccacgccaccggccgccagcagctcgaggggtggcgagcctggcccaggccccctgcctcgctcgctgtcccgctccaacagtctcccgcacccagctggcgggggcaaggcgggcggcccgggtgtggcggcagagcctggcacaccattcagcattggccgcttcgccacgctcacactgcaggagcggcgggaccggggggcagagaaggagcacaagcgctaccacagcctgggcaacatcagccggggtggcagtggcggcagtggcagtggtggggagaagcccagcggccctgttccccgcagccgcctggaccccgccaaggtgctgggcactgcgctgtgcccgcgcatccacgaggtgcccctgctggagccccttgtgtgcaagaagatcgcccaggagcggctcacagtcctcctgttcctggaggactgcatcatcactgcctgccaggagggcctcatctgcacctggccgcggccgggcaaggcgttcacagacgaggagaccgaggcccagacaggggaaggaagttggcccaggtcacccagcaagtcagtggtagagggcatctcctcccaaccaggcaactccccgagtggcacagtggtgtgaagccatggatatcgggcccccccaaccccatgcccccagcctcctagccataaccctccctgctgacctcacagatcaacgtattaacaagactaaccatgatggatggactgctccagtccccccacctgcacaaaatttgggggccccccagactggcccggacacgggcgatgtaatagcccttgtggcctcagccttgtcccccacccactgccaagtacaatgacctcttcctctgaaacatcagtgttaccctcatccctgtccccagcatgtgactggtcactcctggggagagactccccgcccctgccacaagagccccaggtctgcagtgtgcccctcagttgagtgggcagggcgggggtggtccagccctcgcccggcccccaccccagctgcccttgctattgtctgtgcttttgaagagtgttaaattatggaagcccctcaggttcctccctgtcccgcaggacctcttatttatactaaagttccctgttttctcagcgggtctgtccccttcggaggagatgatgtagaggacctgtgtgtgtactctgtggttctaggcagtccgctttccccagaggaggagtgcaggcctgctcccagcccagcgcctcccaccccttttcatagcaggaaaagccggagcccagggagggaacggacctgcgagtcacacaactggtgacccacaccagcggctggagcaggaccctcttggggagaagagcatcctgcccgcagccagggcccctcatcaaagtcctcggtgttttttaaattatcagaactgcccaggaccacgtttcccaggccctgcccagctgggactcctcggtccttgcctcctagtttctcaggcctggccctctcaaggcccaggcaccccaggccggttggaggccccgacttccactctggagaaccgtccaccctggaaagaagagctcagattcctcttggctctcggagccgcagggagtgtgtcttcccgcgccaccctccaccccccgaaatgtttctgtttctaatcccagcctgggcaggaatgtggctccccgccaggggccaaggagctattttggggtctcgtttgcccagggagggcttggctccaccactttcctcccccagcctttgggcagcaggtcacccctgttcaggctctgagggtgccccctcctggtcctgtcctcaccaccccttccccacctcctggg

SEQ ID NO: 692 - DNA, 2187 bp, Homo sapiens
gaattccggcttgggcgcaggtcggagctgggtgggccggctccccggcctggcttgggcgaccatgtccgcatccgcccagcagctggcggaggagctgcagatcttcggcctagactgcgaggaggctctaattgagaaattggtagagctttgtgttcagtatggacagaatgaggagggaatggtaggcgagcttatagccttctgcaccagcacacataaagttggccttacctcagagatcctgaactcttttgagcatgagtttctgagcaaaagattatcgaaagccaggcatagtacctgcaaggacagtggccatgcaggagctagagacattgtttccattcaagagctaattgaagtggaagaagaagaggaaatcctcttgaactcttacaccacaccttcaaagggttctcagaagcgagctatctctaccccagaaacccccctaacaaaaaggagtgtgtcaactcgtagcccccatcagctactctcaccgtcaagtttctctccaagtgctactccctcccagaaatacaactcacgaagtaaccgaggagaagtggttacctccttcggcttagcacagggagtatcttggtctgggagaggaggagctggaaacatcagcctgaaggtcttgggatgtccagaggcactaactgggagctacaaatccatgtttcagaagctcccagacattcgagaagttctgacctgtaagatagaagaacttggcagcgaactcaaggaacattacaagattgaagctttcactcctttgctagccccagcacaggagcctgtcactctgctgggccagattggctgtgatagcaacgggaagctgaacaacaagtcagtgattctcgagggagaccgggaacattcctcgggtgctcaaattccagtggatttatctgagcttaaggaatattctctgtttcctggacaggttgtaattatggaaggaatcaacaccactggtaggaaacttgttgccaccaaactctacgagggtgtgccacttccattttatcagcccactgaagaggatgcagactttgagcaaagcatggtcctggttgcctgtggaccatacaccacatctgacagcatcacgtatgaccccctgcttgacctgattgctgtcatcaaccatgaccggccagatgtctgcatcctgtttggccctttcctggagtctaagcatgaacaggtggagaattgtctactgacaagtccatttgaagacattttcaagcagtgtctacgaacaattattgaaggcacaagaagctccggctcccaccttgtctttgtcccgtcattgagagatgtgcaccatgagcctgtgtacccccagccgcctttcagctactccgatctgtctcgagaggacaaaaagcaagtacagtttgtgtccgagccctgcagcctctccataaacggagtgatcttcggcttgacatccacagatctgcttttccacctgggggccgaggagatcagtagttcttccggaacttcagacagattcagccgaatactcaagcacatcttgacccagaggagctactacccactctacccgccccaagaagacatggccattgactatgagtcgttctatgtttacgcacagctgcctgtcaccccagatgtcctcatcatcccgtcagagctgaggtacttcgtgaaggatgtcctcggctgtgtctgtgtgaaccctgggcgccttaccaaagggcaggtgggaggcaccttcgcccgactctaccttaggaggccggcagcggacggggcagagaggcagagcccatgcattgctgtgcaggtcgtcaggatctgaggcttctgtcctctgctgttctctgctgtgtgggcccttaaagtcttagccaagagccaagacatagccctgtgacaaggtgaacagttgggtgggaaaggagagaggagccagccagggaggggcagctgcagtgaccaggcccagcaggaggacttgtgcagccgggcctgcctgtgagtggtgcctctcctggaagaagctcttgcttctcagtccatgctccgtgtccagaagtaagccagctgtggatcccgcccactcagaaaaggcgagaaggctttgtgattttctacatgaatcaaacacagaaacaccggaattcc

SEQ ID NO: 693 - DNA, 1438 bp, Homo sapiens
atcaaggtgatcccaaaacgaaccaacagaccaggcatcagcacaacagaccggggttttccacgagcccgctaccgcgcccggaccaccaactacaacgtccggctttctgagttgggtggcgggaaaggcgatgagtaaaggccgggcagaagctgcgggagccgccgggatcctcctgaggtacctgcaggagcagaaccggccctacagctcccaggatgtgttcgggaacctacagcgggaacacggactgggcaaggcggtggtggtgaagacgctggagcagctggcgcaacaaggcaagatcaaagagaagatgtacggcaagcagaagatctattttgcggatcaggaccagtttgacatggtgagtgatgctgaccttcaagtcctagatggcaaaatcgtggccctcactgctaaggtgcagagcttgcagcagacgtgccgctacatggaggctgagctcaaggaattatctagtgccctgaccacaccagagatgcagaaagaaatccaggagttaaagaaggaatgcgctggctacagagagagattgaagaacattaaagcagctaccaatcatgtgactccagaagagaaagagcaggtgtacagagagaggcagaagtactgtaaggagtggagggaagaggaagaggatggctacagagctgtcttgatgcaatacttgaaggataccccaagagcaagaagcagttctttgaggaagttgggatagagacggatgaagattacaacgtcacactcccagacccctgaggggcccacggtcaggactggtggggactgcaggatgtcagaagagtgagatgtcttgcactggctaccttgtttttggttggcttttgttgttgttcctcttacttttcactttagcagagcagtcaggagacaagcataaaccagagcactgggtagagaggatgagggctggtggctgggggtagaccccacgcatttcattgtctaaattgcagtagcttgaggttaacatttagacttggaacaatgctaaaggaaagcatttggcaatatttattataatttaattttatataaaaatatttaatttcctctggatagtcaaacctgccagatatcaaacctgaggaaggcagaagtgaatttggagaactagggtagagagaggttgctataaaacgagcatttggagggcccacggcttcactcaggacctgctgggcttgtgtaccccaggagcccttttaagtatcttttgtacgcttttcaccccacccccaagtcctgggagaaatgcaggcaacactgagacatgggagaggccaagatatgcttgacagaaagggtgattttgaggctcagttaatatttcaaaattgtaaccgtagcaaaactgcattggtatttagaaaaataaaaaatttccaat

SEQ ID NO: 694 - DNA, 1359 bp, Homo sapiens
ctttttggtgtaaatctggactctaattctgtaatatatcaaggaatctcgtaaaaccgacactaaaacgtccctgcctacaaatcatccggccaaattatgagttcattgtattatgcgaatgctttattttctaaatatccagcctcaagttcggttttcgctaccggagccttcccagaacaaacttcttgtgcgtttgcttccaacccccagcgcccgggctatggagcgggttcgggcgcttccttcgccggctcgatgcagggcttgtaccccggcggggggggcatggcgggccagagcgcggccggcgtctacgcggccggctatgggctcgagccgagttccttcaacatgcactgcgcgccctttgagcagaacctctccggggtgtgtcccggcgactccgccaaggcggcgggcgccaaggagcagagggactcggacttggcggccgagagtaacttccggatctacccctcgatgcgaagctcaggaactgaccgcaaacgaggccgccagacctacacccgctaccagaccctggagctggagaaggaatttcactacaatcgctacctgacgcggcggcggcgcatcgagatcgcgcacgcgctctgcctcacggaaagacagatcaagatttggtttcagaaccggcgcatgaagtggaaaaaggagaacaagaccgcgggcccggggaccaccggccaagacagggctgaagcagaggaggaagaggaagagtgagggatggagaaagggcagaggaagagacatgagaaagggagacgaagagaagcccagctctgggaactgaatcaggaaactcaaatcgaatagggaagtaaaaaaacaaaacaaaaaacaaaaaaaaacaaaaaaaaaccctatttaaatgaaaggagtttaaaaacattttttaaggagggagaaaggagaaattttggtttttcaacactgaaaaaatagtacctataggaaagtctgtcaggtttggtttttttgtacaatatgaaaaggacattatctacctgttctgtagctttctggaatttacctccccttttctatgttgctattgtaaggtctttgtaaaatcttgcagttttgtaagccctctttaatgctgtctttgtggactgtgggtctggactaaccctgtggttgcctgccctcctgtgcctccgccttcccagcagcggcaccaaggggccttagggagccccaaaacctaccactcgcgtgttccccaagcgccttgctgctgctgcttgcttcccgtcccccagccccatgctccctttacattctgtgtgtatctaaaggatggaaaaataaaacgcaattaaaaat

SEQ ID NO: 695 - DNA, 1452 bp, Homo sapiens
ttggtttctgctgggtgtaggtccttggctggtcgggctccggtgttctgcttctccccgctgagctgctgcctggtgaagaggaagccatggcgctccgagtcaccaggaactcgaaaattaatgctgaaaataaggcgaagatcaacatggcaggcgcaaagcgcgttcctacggcccctgctgcaacctccaagcccggactgaggccaagaacagctcttggggacattggtaacaaagtcagtgaacaactgcaggccaaaatgcctatgaagaaggaagcaaaaccttcagctactggaaaagtcattgataaaaaactaccaaaacctcttgaaaaggtacctatgctggtgccagtgccagtgtctgagccagtgccagagccagaacctgagccagaacctgagcctgttaaagaagaaaaactttcgcctgagcctattttggttgatactgcctctccaagcccaatggaaacatctggatgtgcccctgcagaagaagacctgtgtcaggctttctctgatgtaattcttgcagtaaatgatgtggatgcagaagatggagctgatccaaacctttgtagtgaatatgtgaaagatatttatgcttatctgagacaacttgaggaagagcaagcagtcagaccaaaatacctactgggtcgggaagtcactggaaacatgagagccatcctaattgactggctagtacaggttcaaatgaaattcaggttgttgcaggagaccatgtacatgactgtctccattattgatcggttcatgcagaataattgtgtgcccaagaagatgctgcagctggttggtgtcactgccatgtttattgcaagcaaatatgaagaaatgtaccctccagaaattggtgactttgcttttgtgactgacaacacttatactaagcaccaaatcagacagatggaaatgaagattctaagagctttaaactttggtctgggtcggcctctacctttgcacttccttcggagagcatctaagattggagaggttgatgtcgagcaacatactttggccaaatacctgatggaactaactatgttggactatgacatggtgcactttcctccttctcaaattgcagcaggagctttttgcttagcactgaaaattctggataatggtgaatggacaccaactctacaacattacctgtcatatactgaagaatctcttcttccagttatgcagcacctggctaagaatgtagtcatggtaaatcaaggacttacaaagcacatgactgtcaagaacaagtatgccacatcgaagcatgctaagatcagcactctaccacagctgaattctgcactagttcaagatttagccaaggctgtggcaaaggtgtaacttgtaaacttgagttggagtactatactttacaaactaaaattggcacatgtgcatctgt

SEQ ID NO: 696 - DNA, 2218 bp, Homo sapiens; identical to SEQ ID NO: 57

SEQ ID NO: 697 - DNA, 871 bp, Homo sapiens; identical to SEQ ID NO: 58

SEQ ID NO: 698 - DNA, 1764 bp, Homo sapiens
ccgggatgcgaaggagcgggacaccatgaaggaggacggcggcgcggagttctcggctcgctccaggaagaggaaggcaaacgtgaccgtttttttgcaggatccagatgaagaaatggccaaaatcgacaggacggcgagggaccagtgtgggagccagccttgggacaataatgcagtctgtgcagacccctgctccctgatccccacacctgacaaagaagatgatgaccgggtttacccaaactcaacgtgcaagcctcggattattgcaccatccagaggctccccgctgcctgtactgagctgggcaaatagagaggaagtctggaaaatcatgttaaacaaggaaaagacatacttaagggatcagcactttcttgagcaacaccctcttctgcagccaaaaatgcgagcaattcttctggattggttaatggaggtgtgtgaagtctataaacttcacagggagaccttttacttggcacaagatttctttgaccggtatatggcgacacaagaaaatgttgtaaaaactcttttacagcttattgggatttcatctttatttattgcagccaaacttgaggaaatctatcctccaaagttgcaccagtttgcgtatgtgacagatggagcttgttcaggagatgaaattctcaccatggaattaatgattatgaaggcccttaagtggcgtttaagtcccctgactattgtgtcctggctgaatgtatacatgcaggttgcatatctaaatgacttacatgaagtgctactgccgcagtatccccagcaaatctttatacagattgcagagctgttggatctctgtgtcctggatgttgactgccttgaatttccttatggtatacttgctgcttcggccttgtatcatttctcgtcatctgaattgatgcaaaaggtttcagggtatcagtggtgcgacatagagaactgtgtcaagtggatggttccatttgccatggttataagggagacggggagctcaaaactgaagcacttcaggggcgtcgctgatgaagatgcacacaacatacagacccacagagacagcttggatttgctggacaaagcccgagcaaagaaagccatgttgtctgaacaaaatagggcttctcctctccccagtgggctcctcaccccgccacagagcggtaagaagcagagcagcgggccggaaatggcgtgaccaccccatccttctccaccaaagacagttgcgccgctgctccacgttctcttctgtctgttgcagcggaggcgtgcgtttgcttttacagatatctgaatggaagagtgtttcttccacaacagaagtatttctgtggatggcatcaaacagggcaaagtgttttttattgaatgcttataggttttttttaaataagtgggtcaagtacaccagccacctccagacaccagtgcgtgctcccgatgctgctatggaaggtgctacttgacctaagggactcccacaacaacaaaagcttgaagctgtggaggcgcacggtggcgtggctctcctcgcaggtgttctgggctccgttgtaccaagtggagcaggtggttgcgggcaagcgttgtgcagagcccatagccagctgggcagggggctgccctctccacattatcagttgacagtgtacaatgcctttgatgaactgttttgtaagtgctgctatatctatccattttttaataaagctaatactgtttctttagagcacactggcgggtcgt

SEQ ID NO: 699 - DNA, 2311 bp, Homo sapiens
gatttaatcctatgacaaactaagttggttctgtcttcacctgttttggtgaggttgtgtaagagttggtgtttgctcaggaagagatttaagcatgcttgcttacccagactcagagaagtctccctgttctgtcctagctatgttcctgtgttgtgtgcattcgtcttttccagagcaaaccgcccagagtagaagatggattggggcacgctgcagacgatcctggggggtgtgaacaaacactccaccagcattggaaagatctggctcaccgtcctcttcatttttcgcattatgatcctcgttgtggctgcaaaggaggtgtggggagatgagcaggccgactttgtctgcaacaccctgcagccaggctgcaagaacgtgtgctacgatcactacttccccatctcccacatccggctatgggccctgcagctgatcttcgtgtccagcccagcgctcctagtggccatgcacgtggcctaccggagacatgagaagaagaggaagttcatcaagggggagataaagagtgaatttaaggacatcgaggagatcaaaacccagaaggtccgcatcgaaggctccctgtggtggacctacacaagcagcatcttcttccgggtcatcttcgaagccgccttcatgtacgtcttctatgtcatgtacgacggcttctccatgcagcggctggtgaagtgcaacgcctggccttgtcccaacactgtggactgctttgtgtcccggcccacggagaagactgtcttcacagtgttcatgattgcagtgtctggaatttgcatcctgctgaatgtcactgaattgtgttatttgctaattagatattgttctgggaagtcaaaaaagccagtttaacgcattgcccagttgttagattaagaaatagacagcatgagagggatgaggcaacccgtgctcagctgtcaaggctcagtcgccagcatttcccaacacaaagattctgaccttaaatgcaaccatttgaaacccctgtaggcctcaggtgaaactccagatgccacaatgagctctgctcccctaaagcctcaaaacaaaggcctaattctatgcctgtcttaattttctttcacttaagttagttccactgagaccccaggctgttaggggttattggtgtaaggtactttcatattttaaacagaggatatcggcatttgtttctttctctgaggacaagagaaaaaagccaggttccacagaggacacagagaaggtttgggtgtcctcctggggttctttttgccaactttccccacgttaaaggtgaacattggttctttcatttgctttggaagttttaatctctaacagtggacaaagttaccagtgccttaaactctgttacactttttggaagtgaaaactttgtagtatgataggttattttgatgtaaagatgttctggataccattatatgttccccctgtttcagaggctcagattgtaatatgtaaatggtatgtcattcgctactatgatttaatttgaaatatggtcttttggttatgaatactttgcagcacagctgagagaggctgtctgttgtattcattgtggtcatagcacctaacaacattgtagcctcaatcgagtgagacagactagaagttcctagttggcttatgatagcaaatggcctcatgtcaaatattagatgtaattttgtgtaagaaatacagactggatgtaccaccaactactacctgtaatgacaggcctgtccaacacatctcccttttccatgctgtggtagccagcatcggaaagaacgctgatttaaagaggtgagcttgggaattttattgacacagtaccatttaatggggagacaaaaatgggggccaggggagggagaagtttctgtcgttaaaaacgagtttggaaagactggactctaaattctgttgattaaagatgagctttgtctaccttcaaaagtttgtttggcttacccccttcagcctccaattttttaagtgaaaatataactaataacatgtgaaaagaatagaagctaaggtttagataaatattgagcagatctataggaagattgaacctgaatattgccattatgcttgacatggtttccaaaaaatggtactccacatacttcagtgagggtaagtattttcctgttgtcaagaatagcattgtaaaagcattttgtaataataaagaatagctttaatgatatgcttgtaactaaaataattttgtaatgtatcaaatacatttaaaacattaaaatataatctctataat

SEQ ID NO: 700 - DNA, 2838 bp, Homo sapiens
gggcgcagagctgggccgagccgtcgccggcgccacgcgagtcccgcagccgccgcgcccgggcaatgggccgggggcactgagggccgccggggccgagcgcggaggggggaccgagccagtgccgtgccctcgggccgcgccaacatgccccgcggcttcctggtgaagcgcagcaagaagtccacgcccgtttcctaccgggtccgcggcggcgaggacggcgaccgcgcactgctgctctcgcccagctgcgggggcgcccgcgccgagcccccggcgccgagcccggtccccgggccgctgccgccgccgccgcccgcggagcgcgcccatgcagcgctcgccgccgcgcttgcctgcgcgcctgggccgcagccacccccgcagggcccgcgggccgcgcacttcggcaaccccgaggctgcgcaccccgcgccgctctacagtcccacgcggcccgtgagccgcgagcacgagaagcacaagtacttcgaacgcagcttcaacctgggctcgccggtctcggccgagtccttccccacgcccgccgcgctgctcggagggggcggcggcggcggcgcgagcggagctggcggaggcggcacctgcggcggcgacccgctgctcttcgcgcccgccgagctcaagatgggcacggcgttctcggctggcgccgaggcggcccgcggcccgggccccggccccccactgccccctgccgccgccctgcggcccccgggaaagcggcccccgccccctaccgccgcggagccgcccgccaaggcagtcaaggccccgggcgccaagaagcccaaggccatccgcaagctgcacttcgaggacgaggtgaccacgtcgcccgtgctggggctcaagatcaaggagggcccggtggaggcgccgcggggccgcgcggggggcgcggcgcggccgctgggcgagttcatctgccagctgtgcaaggaggagtacgccgacccgttcgcgctggcgcagcacaaatgctcgcgcatcgtgcgtgtggagtaccgctgtcccgagtgcgccaaggtcttcagctgcccggccaacctggcctcgcaccgccgctggcacaaaccgcggcccgcgcccgccgccgcccgcgcgccggagccagaagcagcagccagggctgaggcgcgggaggcacccggcggcggcagcgaccgggacacgccgagccccggcggcgtgtccgagtcgggctccgaggacgggctctacgagtgccatcactgcgccaagaagttccgccgccaggcctacctacgcaagcacctgctggcgcaccaccaggcgctgcaggccaagggcgcgccgctagcgcccccggccgaggacctactggccttgtaccccgggcccgacgagaaggcgccccaggaggcggccggcgacggcgagggggccggcgtgctgggcctgagtgcgtccgccgagtgccacctgtgcccagtgtgcggagagtcgttcgccagcaagggcgctcaggagcgccacctgcgcctgctgcacgccgcccaggtgttcccctgcaagtactgcccggccaccttctacagctcgcccggccttacgcggcacatcaacaagtgccacccatccgaaaacagacaggtgatcctcctgcaggtgcccgtgcgcccggcctgctagagcgcgccctccaccccggcccccgaactgtgccttcgcttggagacccacaaagagagtgcgccctgcacgccccgaacccgagtccgcgctgggggagcctcgcccccgcccccaccgggtgagagtgtcgtctccgcttctctcggtgtggcgtgacggtaaccccatactctccttttgactccttttggaacccccacttttacgttgtgtccctccgcctcccccatggcgcaacaggagtcagtctctttctgtacaagggagaaaagctgtacgcgtttgtctcgtggttggaagcctccccttggcggggagaagctttttttcttgctagtattcgctgtgttcatggtctagaaatgcggtctggtctcgcctcgcctaccaatctctgctctctatgtatgtagcgtacgggttgttttgggtgaatcttgaggaataaatgcctttatatttcacaggctgtaaattgaacttcccacacgattagctttattatggcttgtgaactgctggagtctggctttacctttttgtatgtgaacaaatcaaattgcttaaaaaagagttttctttagtatagccacaaatgccttgaactgttgtctgggattgttttgtggggggagggaagggagtgttccgaagatgctgtagtaactgcctcagtgtttcacgtaagactttttggtttgatcatctttgttgaggtaggactatcagttccctctaaatgtatatgttgatttatgagtaattgttatttattctttatttatttatattaattatgaagattatgatattatttgattgcagatttttttggcgcgctgccccctccccaccctgccactcttgacattccactgtgcgttttagaagagagcctttttctaaagggatctgcttaaagttttaacttttatacctatctgagtgaattacagacaacctatcatttattctgcttcgagggtccccagggcccttgtacaaccgacagctcttacttttaaatgcaatctcttttctacatacattattttcttaattgttagctatttatagaaagcttcaatagaactgtttcaactgtataactatttactattcaaataaaatattttcaaagtcaaaaaaaaaaaa

SEQ ID NO: 701 - DNA, 3608 bp, Homo sapiens
ttacaccttggccgcagcggcaggtccttcctcgtgctttcggtggcgacatggagctggaggagttggggatccgagaggaatgtggcgtgttcgggtgcatcgcctcaggagagtggcccacgcagctggatgtaccgcatgtgatcactctgggactcgtggggctgcagcaccggggtcaggagagtgctggtattgtgactagtgatgggagttcggtgccaacattcaaatcacacaagggaatgggtcttgtaaatcacgtctttactgaagacaatttgaaaaaattatatgtttcaaatcttggaattggacacaccaggtatgccaccacaggaaaatgtgaactagaaaattgtcagcccttcgttgttgaaacacttcatgggaagatagctgtggcacataatggcgaattggtaaatgctgctcgattaaggaaaaagcttctgcgtcatggtattggtctgtctacaagttctgatagtgaaatgattacccagttactggcgtatacccctcctcaggaacaagatgacaccccagactgggtagccaggattaaaaacttgatgaaggaagcacccacagcatactccctgcttataatgcacagagatgttatttatgcagtacgagatccttatggaaatcgtcccttatgcattggtcgtcttattccagtgtctgatataaatgacaaagagaaaaaaacatcagaaacagaaggatgggtggtgtcttcagaatcttgtagcttcttatctattggtgcaagatattaccgtgaagtcttgcctggagaaattgtggaaatatccagacacaatgtccaaactcttgatattatatcaaggtctgaaggaaacccagtggctttttgtatctttgaatatgtttattttgcaagaccagacagtatgttcgaagaccaaatggtttatacagtaagataccgttgtggccagcagctagcgattgaagcacctgtggatgcagatttggttagcactgttccagaatctgctacgcctgctgctcttgcttacgcaggaaagtgtggacttccatatgtggaggtgctgtgtaaaaaccggtatgtagggagaaccttcattcagccaaacatgaggttaagacaacttggtattgcaaaaaaatttggagtattgtcagacaactttaaaggcaaaagaattgttcttgtagatgattcaattgtcagaggcaataccatctcacctataataaaactgctcaaagaatctggtgcaaaagaggtacacattcgagtagcttcaccaccaattaaatatccatgcttcatgggaataaacattcctacaaaagaagagctcattgccaataaaccagaatttgatcaccttgcagaatatctaggagcaaacagtgttgtgtatctgtcagtagaaggactggtttcatctgtacaagaagggataaagtttaaaaaacagaaagagaaaaagcacgatattatgatccaagaaaatggaaatggtctggaatgttttgaaaagagtggtcattgtacagcttgtctcactggaaaatatcctgtagaattagaatggtagctggtagggttggatgtgtgtagtttcaagatagaaagttggtcaagaagttatagtggtcacacctcatctatttactgttactcagttggtacaatgtaaaatgccatgcttatgtttataagttttgagatttttttttttttctgaaaaggataccaaagtgcgataactgaacatttccaattgcatataatacaacaatatgtggtgttcttttttttacacaagcattggctagcctttttaacctggtcagagaaggcaggtggtcactgacatttcccaagtccatgctttaaagggtttgcaagaagttagggttaaggagaggtgatgccaacaagacaggtgagttaaatataccatttcacacaaagtttgaatagaatacattatacctcataggtgtctagcctctacagttctggctgtagttatgaccttggcttccctgtctaactgtagacaaatctttaaaaaaaaaaaaaaaaaatctggtgcctcagtttccccacatgtgcaatgggatacttattaaataattaataagaatgtgaataagtgtcatacttttgtgatttgagccatcatttcacttctgattttaagacaactcatgattgttagctttcagaaagctaatgattgttaactttttgaaattagtttacaattaattaagatttcattatgatggaaggagacataattggcagatctttgccatctctctttgagatgtcctaaaaagggttgtaaaaatctgtgaaaaagtttttcctacatttgactagaaaatgtgatccatagtatttagtgccctgatactataagctcagcaagtaacctggtacatttgaaataaaaaccaaatttttagattcaaacaatccctttatccttaatttaattaattatcatatgctttttttaatgaagtgcttgatcacttgcaaacatatatacatgtagatgtacatatacatgtacacatacacataaatattattgcaattaagtgatcaagtacagacacaataggggccagttttgtttaaggatcaaagagacaaccactttggggaattagtatcaacttacaatccaagtccaagtatcatcttataatcacttttttctactatattaagatctaatgaatttgatttcttttttgaagttttttcttgtaacatctgagattagaagtttaagatgacttgaccccaaacctttgtttatgtaagaatttttaaacataaaagtgtttgtttctgttatgttaccataatttgatgtatatagtgtccagatccatttagaaatttaatatttattaataactgaaactgtttgtcttcctttggtatatagtctcgcatattatattatagcaggccaagataaaattttgacagctctttaagcccacatgcagcagtgggtcagataaccctgtggcagtgacacgggcaaattggcatttgaataaagccctgggaccacctcaacatgcgtagcctcttgtcttaaatgtactccccatggcagcatggaggaggcaagacctgtgggtcaattttgaactggccttactttgatttttaaaacaagagactcagggaaagtactaaaccaaaatctctgattttactttgcgttttctgtagtttttgttttactgagatgcttttgtaaaggaaaataatactgtgacagtttagtaattctacagattcttaatatttctccatcatggccttttacttcacaattttctgaagtctgaattcaattacaattttttttttttaccaatttaatctcaaatgttgtttaactgctttaaattcatatacgtagagtattataaactgcagagatgaaaaatgtgttttcacgggatttatattgtgaactaaactaagcctactttttgtgacttatttgtgatgccttgttgataaatatgtgtaataagtatgtttaaaaaaaaaaaaa

SEQ ID NO: 702 - DNA, 10172 bp, Homo sapiens
atggggagaagacggaggctgtgtctccagctctacttcctgtggctgggctgtgtggtgctctgggcgcagggcacggccggccagcctcagcctcctccgcccaagccgccccggccccagccgccgccgcaacaggttcggtccgctacagcaggctctgaaggcgggtttctagcgcccgagtatcgcgaggagggtgccgcagtggccagccgcgtccgccggcgaggacagcaggacgtgctccgagggcccaacgtgtgcggctccagattccactcctactgctgccctggatggaagacgctccctggaggaaaccagtgcattgtcccgatttgtagaaatagttgtggagatggattttgttcccgtcctaacatgtgtacttgttccagtgggcaaatatcatcaacctgtggatcaaaatcaattcagcagtgcagtgtgagatgcatgaatggtgggacctgtgcagatgaccactgccagtgccagaaaggatatattggaacttattgtggacaacctgtctgtgaaaatggatgtcagaatggtggacgttgcatcgcccaaccgtgtgcttgtgtttatgggttcactggtccacagtgtgaaagagattacaggacaggcccgtgtttcactcaggtcaacaaccagatgtgccaagggcagctgacaggcattgtctgcacgaagactctgtgctgtgccaccactggacgggcgtggggccatccctgtgagatgtgtccagcccagcctcagccctgccgacggggtttcatccccaacatccgcactggagcttgccaagatgttgatgaatgccaggctatcccagggatatgccaaggaggaaactgtatcaatacagtgggctcttttgaatgcagatgccctgctggtcacaaacagagtgaaactactcagaaatgtgaagacattgatgagtgcagcatcattcctgggatatgtgaaactggtgaatgttccaacaccgtgggaagctatttttgtgtttgtccacgtggatatgtaacctcaacagatggctctcgatgcatcgatcagagaacaggcatgtgtttctcgggcctggtgaatggccgctgtgcacaagagctcccggggagaatgacgaaaatgcagtgctgctgtgagcctggccgctgctggggcatcggaaccattcctgaagcctgtcctgtcagaggttctgaggaatatcgcagactttgcatggatggacttccaatgggaggaattccagggagtgctggttccagacctggaggcactgggggaaatggctttgccccaagtggcaatggcaatggctatggcccaggagggacaggcttcatccccatccctggaggcaatggcttttctcctggcgttgggggagccggtgtgggggccgggggacagggacctatcatcactggactaacaattctgaaccagacaatagatatctgtaagcatcatgctaacctttgtttaaatggacgctgtataccaactgtctcaagctaccgatgtgaatgcaacatgggttataagcaggatgcaaatggagattgtatagatgttgatgaatgcacatcaaatccctgcactaatggagattgtgttaacacacctggttcctattattgtaaatgtcatgctggattccagaggactcctaccaagcaagcatgcattgatattgatgagtgcatccagaatggggttctttgtaaaaacggtcgatgcgtgaactcagatggaagtttccagtgcatttgcaatgccggctttgaattaactacagatggaaaaaactgtgttgatcatgatgaatgtacaactaccaacatgtgtttgaatggaatgtgcatcaatgaagatggcagcttcaagtgcatctgcaaaccaggatttgtcttggctccaaatgggcgttactgtactgatgttgatgaatgccagaccccaggaatctgcatgaatgggcactgcatcaacagtgaagggtccttccgctgtgactgtcccccaggcctggctgtgggcatggatggacgtgtgtgtgttgatactcacatgcgcagtacctgctatggaggaatcaagaaaggagtgtgtgtgcgtcctttccccggtgcagtgaccaagtccgaatgctgctgtgccaatccagactatggttttggagaaccctgccagccatgccctgcaaaaaattcagctgaattccacggcctttgtagtagtggagtaggtatcactgtggatggaagagatatcaatgaatgtgctttggatcctgatatatgtgccaatgggatttgtgaaaacttacgtggtagttaccgttgtaattgcaacagtggctatgaaccagatgcctctggaagaaactgtattgacattgatgaatgtttagtaaacagactgctttgtgataacggattgtgccgaaacacgccaggaagttacagctgtacgtgcccaccagggtatgtgttcaggactgagacagagacctgtgaagatataaatgaatgtgaaagcaacccatgtgtcaatggggcctgcagaaacaaccttggatctttcaattgtgaatgttcgcccggcagcaaactcagctccacaggattgatctgtattgacagcctgaaggggacctgttggctcaacatccaggacagccgctgtgaggtgaatattaatggagccactctgaaatctgaatgctgtgccaccctcggagccgcctgggggagcccctgtgagcggtgtgaactagatacagcttgcccaagagggcttgccaggattaaaggtgttacgtgtgaagatgttaatgagtgtgaggtgttccctggcgtttgtccaaatggacgctgtgtcaacagtaagggatcttttcattgcgagtgccctgaaggccttacgttggatgggactggccgtgtatgtttggatattcgcatggagcagtgttacttgaagtgggatgaagatgaatgcatccaccccgttcctggaaagttccgcatggatgcctgctgctgtgctgtcggggcggcttggggcaccgagtgtgaggagtgccccaaacctggcaccaaggaatacgagacactgtgcccccgcggggctggctttgctaaccgaggggatgttcttactgggcggccattttacaaagacatcaatgaatgcaaagcatttcctgggatgtgcacttatgggaagtgcagaaatacaatcggaagcttcaaatgccgttgcaatagtggctttgctctagacatggaggaaagaaactgcacggacatcgacgagtgcaggatttctcctgacctctgtggcagtggaatctgcgtcaatacaccgggcagctttgagtgcgagtgcttcgaaggctatgaaagtggcttcatgatgatgaagaactgcatggacattgacggatgtgaacgtaaccctctcctttgtaggggtggcacctgtgtgaacactgagggcagctttcagtgtgactgcccactgggacacgagctgtcaccatcccgtgaggactgtgtggatattaatgaatgctccctgagtgacaatctctgcagaaatggaaaatgtgtgaacatgattggaacctatcagtgctcttgcaatcctggatatcaggctacgccagaccgccagggctgtacagatattgatgaatgtatgataatgaacggaggctgtgacacccagtgcacaaattcagagggaagctacgaatgcagctgcagtgagggttatgccctgatgccagatgggagatcgtgtgcagacattgatgaatgtgaaaacaatcctgatatctgtgatggcggccagtgtaccaacattcctggagagtatcgctgcctctgctatgatggcttcatggcttccatggacatgaaaacatgcattgatgtcaatgaatgtgacctaaattcaaatatctgcatgtttggggaatgtgagaacacaaagggatccttcatttgccactgtcagctgggttactcagtgaagaaggggaccacaggatgtacagatgtggatgagtgtgaaattggtgctcataactgcgacatgcatgcctcatgtctgaatatcccaggaagcttcaagtgtagctgcagagaaggctggattggaaacggcatcaagtgtattgatctggacgaatgttctaatggaacccaccagtgtagcatcaatgctcagtgtgtaaataccccgggctcataccgctgtgcctgctccgaaggtttcactggtgatggctttacctgctcagatgttgatgagtgtgcagaaaacataaacctctgtgagaacggacagtgccttaatgtcccgggtgcatatcgctgcgagtgtgagatgggcttcactccagcctcagacagcagatcctgccaagatattgatgaatgctccttccaaaacatttgtgtctctggaacatgtaataacctgcctggaatgtttcattgcatctgcgatgatggttatgaattggacagaacaggagggaactgtacagatattgatgagtgtgcagatcctataaactgtgtcaatggcctatgtgtcaacacgcctggtcgctatgagtgtaactgcccacccgattttcagttgaacccaactggtgtgggttgtgttgacaaccgtgtgggcaactgctacctgaagtttggacctcgaggagatgggagtctgtcttgcaacaccgagatcggggtgggcgtcagtcgctcttcatgctgctgctctctgggaaaggcctggggaaacccctgtgagacatgcccccctgtcaatagcactgaatattacaccctgtgtcccggaggtgaaggcttcagacctaaccccatcacaatcattttagaagacattgacgaatgccaggagttaccaggtctctgccagggtggaaactgcatcaacacttttgggagcttccagtgtgagtgcccacaaggctactacctcagcgaggatacccgcatctgtgaggatattgatgagtgttttgcacatcctggtgtgtgtgggcctgggacctgctataacaccctgggaaattacacctgcatttgcccacctgagtacatgcaggtcaatggaggccacaactgcatggacatgagaaaaagcttttgctaccgaagctataatggaaccacttgtgagaatgagttgcctttcaatgtgacaaaaaggatgtgctgctgcacatataatgtgggcaaagctgggaacaaaccttgtgaaccatgcccaactccaggaacagctgactttaaaaccatatgtggaaatattcctggattcacctttgacattcacacaggaaaagctgttgacattgatgaatgtaaagagattccaggcatttgtgcaaatggtgtgtgcattaaccagattggcagtttccgctgtgaatgccctacaggattcagttacaatgacctgctgttggtttgtgaagatatagatgagtgcagcaatggtgataatctctgccagcggaatgcagactgcatcaatagtcctggtagttaccgctgtgaatgtgccgcgggtttcaaactttcacccaatggggcctgtgtagatcgcaatgaatgtttagaaattcctaacgtttgcagtcatggcttgtgtgttgatctgcaaggaagttaccagtgcatctgccacaatggctttaaggcttctcaggaccagaccatgtgcatggatgttgatgagtgcgagcggcacccatgtggaaatggaacttgtaaaaacaccgttggatcctataactgtctgtgctacccagggtttgaactcactcataataatgattgcctggacatagatgagtgcagttccttttttggtcaggtgtgcagaaatggacgttgttttaatgaaattggttctttcaagtgtctatgtaacgaaggttatgaacttaccccagatggcaaaaactgtatagacactaatgagtgtgtcgcccttcccggctcttgctctcctggtacctgtcagaatttggagggatccttcagatgcatctgtcccccagggtatgaagtaaaaagcgagaactgcattgatataaatgaatgtgatgaagatcccaacatttgtctttttggttcctgtactaatactccagggggcttccagtgcctctgcccccctggctttgtactatctgataatggacggagatgctttgatactcgccagagcttctgcttcacaaattttgaaaatggaaagtgttctgtacccaaagctttcaacaccacaaaagcaaaatgctgctgtagtaagatgccaggagagggctggggggacccctgtgagctgtgccccaaagacgatgaagttgcatttcaggatttgtgtccatatggccatggaactgtccctagtcttcatgatacacgtgaagatgtcaatgagtgtcttgagagcccaggcatttgttcaaatggtcaatgtatcaacaccgacggatcttttcgctgtgaatgtccaatgggctacaaccttgactacactggagtacgctgtgtggatactgatgagtgttcaatcggcaatccgtgtggaaatggtacatgcaccaatgttattgggagttttgaatgcaattgcaatgaaggctttgagccagggcccatgatgaattgtgaagatatcaacgaatgtgcccagaacccactgctgtgtgctttacgctgcatgaacacttttgggtcctatgaatgcacgtgcccgattggctatgccctcagggaagatcaaaagatgtgcaaagatctggatgaatgtgctgaagggttacacgactgtgaatctaggggcatgatgtgtaagaatctaatcggcaccttcatgtgcatctgccctcctggaatggcccgaaggcccgatggagaaggctgtgtagatgaaaatgaatgcaggaccaagccaggaatctgtgaaaatggacgttgtgttaacattattggaagctatagatgtgagtgtaatgaaggattccagtcaagttcttcaggcactgaatgccttgacaatcgacagggtctctgctttgcagaggtactgcagacaatatgtcaaatggcatccagtagtcgcaatctcgtcactaagtcagaatgctgctgtgatggtgggcgaggctggggccaccagtgcgagctttgcccacttcctggaactgcccagtacaaaaagatatgtcctcatggcccaggatatacaactgatggaagagatattgatgaatgtaaggtaatgccaaacctctgcaccaatggtcagtgcatcaataccatgggctcattccgatgcttctgcaaggttggctacaccacagacatcagtggaacctcttgtatagaccttgatgaatgctcccagtccccgaaaccatgcaactacatctgcaagaacactgaggggagttatcagtgttcatgtccgagggggtatgtcctgcaagaggatggaaagacatgcaaagaccttgatgaatgtcaaacaaagcagcataactgccagttcctctgtgtcaacaccctgggggggtttacctgtaaatgtccacctggtttcacacagcatcacactgcttgtatcgacaacaacgaatgtgggtctcaacctttgctttgtggaggaaagggaatctgtcaaaacactccaggcagtttcagctgtgaatgccaaagagggttctctcttgatgccaccggactgaactgtgaagatgttgatgaatgtgatgggaaccacaggtgccaacacggctgccagaacatcctgggtggctacagatgtggctgcccccaaggctacatccagcactaccagtggaatcagtgtgtcgatgagaatgaatgctccaatcccaatgcctgtggctctgcttcctgctacaacaccctggggagttacaagtgcgcctgcccctcggggttctccttcgaccagttctccagtgcctgccacgacgtgaatgagtgctcgtcctccaagaacccctgcaattacggctgctctaacacggaggggggctacctctgtggctgcccccctgggtattacagagtgggacaaggccactgtgtctcaggaatgggatttaacaaggggcagtacctgtcactggatacagaggtcgatgaggaaaatgctctgtccccagaagcatgctacgagtgcaaaatcaacggctatcctaagaaagacagcaggcagaagagaagtattcatgaacctgatcccactgctgttgaacagatcagcctagagagtgtcgacatggacagccccgtcaacatgaagttcaacctctcccacctcggctctaaggagcacatcctggaactaaggcccgccatccagcccctcaacaaccacatccgttatgtcatctctcaagggaacgatgacagcgtcttccgcatccaccaaaggaatgggctcagctacttgcacacggccaagaagaagctcatgcccggcacatacacactggaaatcactagcatccctctctacaagaagaaggagcttaagaaactggaagagagcaatgaggatgactacctcctaggggagcttggggaggctctcagaatgaggctgcagattcagctctattaaccgttcacagacttgggcccaggctcaaatcctagcacagccagtctgcagaagcatttgaaaagtcaaggactaattttaaagaggaaaaataataataactcttgtttctttcctccctgtcttagactttgaatgttgaccctcacagggagggataatttagactctggtatggccaaagatttgagctcaaaggcaaccgtggttactgtattttttatataacttcattttaaaatatattaaaagaaacctaaatgttcaagatatcagcatatggcactaaatgcacaaaaataatgtgagcttttttttttttttcctgttagcagtctgtaacactttgggtattttgctatagttgctaattaaaaaaatatagatgtttatttatttttaatgcagtaatatatggagaaatgaacaaactatgtaaacaaaaagggaaactcacttgtttttctttagatttataaatttgagctattttttttagaggtgctttttaaaaatccaatagatacaagagatgtttcctttggttttctgccagtcatccagctgatacacacctgatcgattttaaagaaagccacacagagctgaatcgggcagtgctaatcaataatttaaaagacatgaatgtcattagatcctttataacgtagatcgaagccaaagcagctcatttgtgacaacatttcatatcaccagacacaccaggcaacagaagttgaagcacaaccactgtagcaaaataccttgactgcttgtgagaccattagcattgcaggccaaaccgtactgtatttccttctcataacctcaaggaaccatatgtgctacccacaacacctcattcttacccagggtgcgctgcgtcctcatggtactgtaggcagctgaagaaccgccgttcccttgaaagggaacacctggcattctgtggtgtttcgtgctgtcttaaataatggtgcatttattatgttcaagttatttcaggattgccatatgtgcaaacaaatcatgcaatgcagccaaggaatatatgttgttgttgttgttttaaacccattttttttttagaattttcattaatactgtagttatacaccatatgcctcattttatcatagcctattgtgtatgaaagatgtttgtacaatgaattgatgtttagtttgctttagtcatttaaaaagatattgtaccaggatgtgctattaagagcacgtatccattattcttctcaacccaagaacctgtttcctggaccagtgaccaaacctcatatgtgaaatggccaaagcacatgcaggctcctggttgttcctctcaaacctgtgctgaccaaagattagtaaccagttatacccagtattttgaggttttattgtttttttaataactaaaaaaaaactcgtgccgaattc

SEQ ID NO: 703 - DNA, 1686 bp, Homo sapiens
ccacgcgtccgggcgtaagccaggcgtgttaaagccggtcggaactgctccggagggcacgggctccgtaggcaccaactgcaaggacccctccccctgcgggcgctcccatggcacagttcgcgttcgagagtgacctgcactcgctgcttcagctggatgcacccatccccaatgcaccccctgcgcgctggcagcgcaaagccaaggaagccgcaggcccggccccctcacccatgcgggccgccaaccgatcccacagcgccggcaggactccgggccgaactcctggcaaatccagttccaaggttcagaccactcctagcaaacctggcggtgaccgctatatcccccatcgcagtgctgcccagatggaggtggccagcttcctcctgagcaaggagaaccagtctgaaaacagccagacgcccaccaagaaggaacatcagaaagcctgggctttgaacctgaacggttttgatgtagaggaagccaagatccttcggctcagtggaaaaccacaaaatgcgccagagggttatcagaacagactgaaagtactctacagccaaaaggccactcctggctccagccggaagacctgccgttacattccttccctgccagaccgtatcctggatgcgcctgaaatccgaaatgactattacctgaaccttgtggattggagttctgggaatgtactggccgtggcactggacaacagtgtgtacctgtggagtgcaagctctggtgacatcctgcagcttttgcaaatggagcagcctggggaatatatatcctctgtggcctggatcaaagagggcaactacttggctgtgggcaccagcagtgctgaggtgcagctatgggatgtgcagcagcagaaacggcttcgaaatatgaccagtcactctgcccgagtgggctccctaagctggaacagctatatcctgtccagtggttcacgttctggccacatccaccaccatgatgttcgggtagcagaacaccatgtggccacactgagtggccacagccaggaagtgtgtgggctgcgctgggccccagatggacgacatttggccagtggtggtaatgataacttggtcaatgtgtggcctagtgctcctggagagggtggctgggttcctctgcagacattcacccagcatcaaggggctgtcaaggccgtagcatggtgtccctggcagtccaatgtcctggcaacaggagggggcaccagtgatcgacacattcgcatctggaatgtgtgctctggggcctgtctgagtgccgtggatgcccattcccaggtgtgctccatcctctggtctccccattacaaggagctcatctcaggccatggctttgcacagaaccagctagttatttggaagtacccaaccatggccaaggtggctgaactcaaaggtcacacatcccgggtcctgagtctgaccatgagcccagatggggccacagtggcatccgcagcagcagatgagaccctgaggctatggcgctgttttgagttggaccctgcgcggcggcgggagcgggagaaggccagtgcagccaaaagcagcctcatccaccaaggcatccgctgaagaccaacccatcacctcagttgttttttatttttctaataaagtcatgtctcccttcatgtttttttttttaaaa

SEQ ID NO: 704 - DNA, 1017 bp, Homo sapiens
gagctcggccctggaggcggcgagaacatggtgcgcaggttcttggtgaccctccggattcggcgcgcgtgcggcccgccgcgagtgagggttttcgtggttcacatcccgcggctcacgggggagtgggcagcgccaggggcgcccgccgctgtggccctcgtgctgatgctactgaggagccagcgtctagggcagcagccgcttcctagaagaccaggtcatgatgatgggcagcgcccgagtggcggagctgctgctgctccacggcgcggagcccaactgcgccgaccccgccactctcacccgacccgtgcacgacgctgcccgggagggcttcctggacacgctggtggtgctgcaccgggccggggcgcggctggacgtgcgcgatgcctggggccgtctgcccgtggacctggctgaggagctgggccatcgcgatgtcgcacggtacctgcgcgcggctgcggggggcaccagaggcagtaaccatgcccgcatagatgccgcggaaggtccctcagacatccccgattgaaagaaccagagaggctctgagaaacctcgggaaacttagatcatcagtcaccgaaggtcctacagggccacaactgcccccgccacaacccaccccgctttcgtagttttcatttagaaaatagagcttttaaaaatgtcctgccttttaacgtagatataagccttcccccactaccgtaaatgtccatttatatcattttttatatattcttataaaaatgtaaaaaagaaaaacaccgcttctgccttttcactgtgttggagttttctggagtgagcactcacgccctaagcgcacattcatgtgggcatttcttgcgagcctcgcagcctccggaagctgtcgacttcatgacaagcattttgtgaactagggaagctcaggggggttactggcttctcttgagtcacactgctagcaaatggcagaaccaaagctcaaataaaaataaaattattttcattcattcactc

SEQ ID NO: 705 - DNA, 2442 bp, Homo sapiens
gcgggattccgggccgggccggcctgggctgcaatcaatgcggctttgtctgggacgcccacatcccagaggccattcccgggtcggcaaatcggagcgcggcggggcgcgcgggggtgagataagcggccatgtgatcccacctgggctggaaggggaggggcgccaggtgaggcggcggccggtggggcgcgggcggccacgcggggctcctgcagcatggctgtcagcaggaaggactggtccgcgctgtccagccttgcccggcagaggactctggaggatgaggaggaacaggagcgcgagcgcaggcggcggcaccgcaacctgagctccaccacggacgatgaggctcccaggctcagccagaatggagaccggcaggcctctgcttctgagagactaccgagcgtggaagaagcagaggtgcccaagccactgcccccagcctccaaagatgaggacgaggacatccagagcatcctcagaacacggcaggagcggaggcagaggcggcaggtggtggaggctgcacaggcccccatccaggagaggctggaggcagaggaggggaggaacagcttgagccctgtgcaggccacacagaaacccctagtctccaagaaggaactggaaatcccacctcgccggagactgagtcgggaacagcggggcccctggcccctggaggaggagagcttggtgggcagggagccagaagagaggaagaaaggggttccagaaaagtccccagtcttggagaagtcctccatgccaaagaagacggcacctgaaaagagcctggtctccgataaaacctccatctctgagaaggtgctggcctcagagaagacatctctatcagagaagatagcagtgtcagagaaaagaaacagctcagagaagaagtctgttctagaaaaaaccagtgtctctgagaagtcgctggccccagggatggcactgggctcaggaaggaggctggtgtctgagaaagcttccatctttgagaaggcactggcctcagagaagagcccaactgcagatgctaagccggccccaaagagggccacagcctcagagcagcccctggcgcaggagccgccagcctctgggggaagcccagccaccaccaaggagcagagaggaagggccctccctgggaagaacctgccctctttggcaaagcagggggcttcagaccctccgactgtggcctcccgcctcccacccgtcacactccaggtgaaaatccccagcaaggaggaagaggcagatatgtcctcacccacacagcgaacctacagcagctccctcaaacgctccagccccaggaccatctcctttcggatgaaacccaagaaagaaaactcggaaacaaccctaactcgcagtgccagcatgaagctcccagacaacacagtgaagttgggagagaagctggagagataccacacggccatacggagatcagaatctgtcaagtctcggggtctgccttgcactgagttattcgtggctcctgtgggtgtagccagcaagcgccacctctttgagaaggaactggcgggccagagccgagcagaaccagcctccagccggaaggagaacttgaggctctcaggggttgtgacatcaaggctcaacctgtggatcagcaggacccaggaatctggagatcaggacccccaggaggcacagaaagcatcatctgcaaccgagaggactcagtggggacagaaatctgactcctcgctggacgctgaggtgtgacaagccccgccaagacagacctgcaagtcttcgtctcaagggacctccctcatgccaggcccctgcctctcacagcagcaccctttcctctcattgtccctgttcccttgttggctgtggatctgtttggccagggtccctggggtcaggaatatttgcaagactcagccagctccttcccagcccagcctcttggggctgggactttctcaccctgcggcaggcacaacagatgctgggacccagtctctgcccaggtcacagcacaagtgcacatcagcactatggggcctatgtcctgcccagagacctctgctccttcctgctcacatccacagtcagggcacggcgcccctcaagaactccagagtcacctgtctcatcggctcccaacaagtgcctctttgtctatgatgtcccccttctctgaggcctggacccacccatctttgtccctgggggctgctcccagccactgaggcccgctctggccaggggagaaggagctgccgtgcgtcttccctgtgccccgtctccctgcttggttctcccctcccttccctggccggctgccatggccaggagctaagtgcctttttgtgtgcaaccacttaccctttctctgaaaaacctgttctcaggaaggatctgataaactcatttactctc

SEQ ID NO: 706 - DNA, 1648 bp, Homo sapiens
atgcgggagatcgtgcacatccaggccggccagtgcggcaaccagatcggggccaagttctgggaagtcatcagtgatgagcatggcatcgaccccagcggcaactacgtgggcgactcggacttgcagctggagcggatcagcgtctactacaacgaggcctcttctcacaagtacgtgcctcgagccattctggtggacctggaacccggaaccatggacagtgtccgctcaggggcctttggacatctcttcaggcctgacaatttcatctttggtcagagtggggccggcaacaactgggccaagggtcactacacggagggggcggagctggtggattcggtcctggatgtggtgcggaaggagtgtgaaaactgcgactgcctgcagggcttccagctgacccactcgctggggggggggacgggctccggcatgggcacgttgctcatcagcaaggtgcgtgaggagtatcccgaccgcatcatgaacaccttcagcgtcgtgccctcacccaaggtgtcagacacggtggtggaaccctacaacgccacgctgtccatccaccagctggtggaaaacacggatgaaacctactgcatcgacaacgaggcgctctacgacatctgcttccgcaccctcaagctggccacgcccacctacggggacctcaaccacctggtatcggccaccatgagcggagtcaccacctccttgcgcttcccgggccagctcaacgctgacctgcgcaagctggccgtcaacatggtgcccttcccgcgcctgcacttcttcatgcccggcttcgcccccctcaccaggcggggcagccagcagtaccgggccctgaccgtgcccgagctcacccagcagatgttcgatgccaagaacatgatggccgcctgcgacccgcgccacggccgctacctgacggtggccaccgtgttccggggccgcatgtccatgaaggaggtggacgagcagatgctggccatccagagcaagaacagcagctacttcgtggagtggatccccaacaacgtgaaggtggccgtgtgtgacatcccgccccgcggcctcaagatgtcctccaccttcatcgggaacagcacggccatccaggagctgttcaagcgcatctccgagcagttcacggccatgttccggcgcaaggccttcctgcactggtacacgggcgagggcatggacgagatggagttcaccgaggccgagagcaacatgaacgacctggtgtccgagtaccagcagtaccaggacgccacggccgaggaagagggcgagatgtacgaagacgacgaggaggagtcggaggcccagggccccaagtgaaactgctcgcagctggagtgagaggcaggtggcggccggggccgaagccagcagtgtctaaacccccggagccatcttgctgccgacaccctgctttccccatcgccctagggctcccttgccgccctcctgcagtatttatggcctcgtcctcccccacctaggccacgtgtgagctgctcctgtctctgtcttattgcagctccaggcctgacgttttacggttttgttttttactggtttgtgtttatattttcggggatacttaataaatctattgctgtcagataccctt

SEQ ID NO: 707 - DNA, 343 bp, Homo sapiens
  misc_feature: n=a,t,g or c
aataaatatggtgcatcaattcaactagaactattattggaaaacaactgagtactgggctgatgattaagttattgcctctcagcttcaaccttgctttattgtgttttagctttgtgagactgtggctgacactctggaaatacacttctgttttaccagctgctccctttncggttctgccaagagggggagctagatagtgccagcaagttggaggaaaaaggaggaagggatctctttctcctggtctgtttcctgttactgactgaccccaaagcccagtgacaaattgtttacctcgctgggaaaaaacagntgttttcagtagcagcggttgctt

SEQ ID NO: 708 - DNA, 554 bp, Homo sapiens
gccagaaccggtggagcagcgacccctgagcagtgttctctgtgctgagcggcgggactgagctgttgagttagagccaacatgagtgagcgacaaggtgctggggcaaccaatggaaaagacaagacatctggtgaaaatgatggacagaagaaagttcaagaagaatttgacattgacatggatgcaccagagacagaacgtgcagcggtggccattcagtctcagttcagaaaattccagaagaagaaggctgggtctcagtcctagtgggagaaccccctcctagtccacctgaaaacaccaaattcaaccatcatctgtcaagaaattaaaagaacaacaccctagagagaagtcatccacacacaatccacacacgcatagcaaacctccaatgcatgtacagaaacctgtgatatttatacccttgtaggaaggtatagacaatggaattgtgagtagcttaatctctatgtttctctccattttcattcctcctgcaactattttccttgatgttgtaataaaatgaagttacgatgagtgaaaaa

SEQ ID NO: 709 - DNA, 1125 bp, Homo sapiens
gcagaaggcaagcccggaggcactttcaagaatgagcatatctcatcttcccggaggaaaaaaaaaaaagaatgggtacgtctgagaatcaaattttgaaagagtgcaatgatgggtcgtttgataatttgtcggaaaaacaatctacctgttatctagctttgggctaggccattccagttccagacgcaggctgaacgtcgtgaagcggaaggggcgggcccgcaggcgtccgtgtggtcctccgtgcagccctcggcccgagccggttcttcctggtaggaggcggaactcgaattcatttctcccgctgccccatctcttagctcgcggttgtttcattccgcagtttcttcccatgcacctgccgcgtaccggccactttgtgccgtacttacgtcatctttttcctaaatcgaggtggcatttacacacagcgccagtgcacacagcaagtgcacaggaagatgagttttggcccctaaccgctccgtgatgcctaccaagtcacagacccttttcatcgtcccagaaacgtttcatcacgtctcttcccagtcgattcccgaccccacctttattttgatctccataaccattttgcctgttggagaacttcatatagaatggaatcaggctgggcgctgtggctcacgcctgcactttgggaggccgaggcgggcggattacttgaggataggagttccagaccagcgtggccaacgtggtgaatccccgtctctactaaaaaatacaaaaattagctgggcgtggtgggtgcctgtaatcccagctattcgggagggtgaggcaggagaatcgcttgaacccgggaggcagaggttgcagtgagccaagatcgtgccactacactccagcctgggcgacaagaacgaaactccgtctcaaaaaaaaggggggaatcatacattatgtgctcatttttgtcgggcttctgtccttcaatgtactgtctgacattcgttcatgttgtatatatcagtattttgctccttttcatttagtatagtccatcgattgtatatccgtccttttgatggccttttgagttgtttcccatttgcggttatgaaataaagctgctataaacaaaaaaaaaaaaaa

SEQ ID NO: 710 - DNA, 2740 bp, Homo sapiens; identical to SEQ ID NO: 77

SEQ ID NO: 711 - DNA, 2148 bp, Homo sapiens
gcttcagggtacagctcccccgcagccagaagccgggcctgcagcccctcagcaccgctccgggacaccccacccgcttcccaggcgtgacctgtcaacagcaacttcgcggtgtggtgaactctctgaggaaaaaccattttgattattactctcagacgtgcgtggcaacaagtgactgagacctagaaatccaagcgttggaggtcctgaggccagcctaagtcgcttcaaaatggaacgaaggcgtttgtggggttccattcagagccgatacatcagcatgagtgtgtggacaagcccacggagacttgtggagctggcagggcagagcctgctgaaggatgaggccctggccattgccgccctggagttgctgcccagggagctcttcccgccactcttcatggcagcctttgacgggagacacagccagaccctgaaggcaatggtgcaggcctggcccttcacctgcctccctctgggagtgctgatgaagggacaacatcttcacctggagaccttcaaagctgtgcttgatggacttgatgtgctccttgcccaggaggttcgccccaggaggtggaaacttcaagtgctggatttacggaagaactctcatcaggacttctggactgtatggtctggaaacagggccagtctgtactcatttccagagccagaagcagctcagcccatgacaaagaagcgaaaagtagatggtttgagcacagaggcagagcagcccttcattccagtagaggtgctcgtagacctgttcctcaaggaaggtgcctgtgatgaattgttctcctacctcattgagaaagtgaagcgaaagaaaaatgtactacgcctgtgctgtaagaagctgaagatttttgcaatgcccatgcaggatatcaagatgatcctgaaaatggtgcagctggactctattgaagatttggaagtgacttgtacctggaagctacccaccttggcgaaattttctccttacctgggccagatgattaatctgcgtagactcctcctctcccacatccatgcatcttcctacatttccccggagaaggaagagcagtatatcgcccagttcacctctcagttcctcagtctgcagtgcctgcaggctctctatgtggactctttatttttccttagaggccgcctggatcagttgctcaggcacgtgatgaaccccttggaaaccctctcaataactaactgccggctttcggaaggggatgtgatgcatctgtcccagagtcccagcgtcagtcagctaagtgtcctgagtctaagtggggtcatgctgaccgatgtaagtcccgagcccctccaagctctgctggagagagcctctgccaccctccaggacctggtctttgatgagtgtgggatcacggatgatcagctccttgccctcctgccttccctgagccactgctcccagcttacaaccttaagcttctacgggaattccatctccatatctgccttgcagagtctcctgcagcacctcatcgggctgagcaatctgacccacgtgctgtatcctgtccccctggagagttatgaggacatccatggtaccctccacctggagaggcttgcctatctgcatgccaggctcagggagttgctgtgtgagttggggcggcccagcatggtctggcttagtgccaacccctgtcctcactgtggggacagaaccttctatgacccggagcccatcctgtgcccctgtttcatgcctaactagctgggtgcacatatcaaatgcttcattctgcatacttggacactaaagccaggatgtgcatgcatcttgaagcaacaaagcagccacagtttcagacaaatgttcagtgtgagtgaggaaaacatgttcagtgaggaaaaaacattcagacaaatgttcagtgaggaaaaaaaggggaagttggggataggcagatgttgacttgaggagttaatgtgatctttggggagatacatcttatagagttagaaatagaatctgaatttctaaagggagattctggcttgggaagtacatgtaggagttaatccctgtgtagactgttgtaaagaaactgttgaaaataaagagaagcaatgtgaagcaaaaaaaaaaaaaaaaaa

SEQ ID NO: 712 - DNA, 3492 bp, Homo sapiens; identical to SEQ ID NO: 78

SEQ ID NO: 713 - DNA, 2653 bp, Homo sapiens
gagcgcggctggagtttgctgctgccgctgtgcagtttgttcaggggcttgtggcggtgagtccgagaggctgcgtgtgagagacgtgagaaggatcctgcactgaggaggtggaaagaagaggattgctcgaggaggcctggggtctgtgagacagcggagctgggtgaaggctgcgggttccggcgaggcctgagctgtgctgtcgtcatgcctcaaacccgatcccaggcacaggctacaatcagttttccaaaaaggaagctgtctcgggcattgaacaaagctaaaaactccagtgatgccaaactagaaccaacaaatgtccaaaccgtaacctgttctcctcgtgtaaaagccctgcctctcagccccaggaaacgtctgggcgatgacaacctatgcaacactccccatttacctccttgttctccaccaaagcaaggcaagaaagagaatggtccccctcactcacatacacttaagggacgaagattggtatttgacaatcagctgacaattaagtctcctagcaaaagagaactagccaaagttcaccaaaacaaaatactttcttcagttagaaaaagtcaagagatcacaacaaattctgagcagagatgtccactgaagaaagaatctgcatgtgtgagactattcaagcaagaaggcacttgctaccagcaagcaaagctggtcctgaacacagctgtcccagatcggctgcctgccagggaaagggagatggatgtcatcaggaatttcttgagggaacacatctgtgggaaaaaagctggaagcctttacctttctggtgctcctggaactggaaaaactgcctgcttaagccggattctgcaagacctcaagaaggaactgaaaggctttaaaactatcatgctgaattgcatgtccttgaggactgcccaggctgtattcccagctattgctcaggagatttgtcaggaagaggtatccaggccagctgggaaggacatgatgaggaaattggaaaaacatatgactgcagagaagggccccatgattgtgttggtattggacgagatggatcaactggacagcaaaggccaggatgtattgtacacgctatttgaatggccatggctaagcaattctcacttggtgctgattggtattgctaataccctggatctcacagatagaattctacctaggcttcaagctagagaaaaatgtaagccacagctgttgaacttcccaccttataccagaaatcagatagtcactattttgcaagatcgacttaatcaggtatctagagatcaggttctggacaatgctgcagttcaattctgtgcccgcaaagtctctgctgtttcaggagatgttcgcaaagcactggatgtttgcaggagagctattgaaattgtagagtcagatgtcaaaagccagactattctcaaaccactgtctgaatgtaaatcaccttctgagcctctgattcccaagagggttggtcttattcacatatcccaagtcatctcagaagttgatggtaacaggatgaccttgagccaagagggagcacaagattccttccctcttcagcagaagatcttggtttgctctttgatgctcttgatcaggcagttgaaaatcaaagaggtcactctggggaagttatatgaagcctacagtaaagtctgtcgcaaacagcaggtggcggctgtggaccagtcagagtgtttgtcactttcagggctcttggaagccaggggcattttaggattaaagagaaacaaggaaacccgtttgacaaaggtgtttttcaagattgaagagaaagaaatagaacatgctctgaaagataaagctttaattggaaatatcttagctactggattgccttaaattcttctcttacaccccacccgaaagtattcagctggcatttagagagctacagtcttcattttagtgctttacacattcgggcctgaaaacaaatatgaccttttttacttgaagccaatgaattttaatctatagattctttaatattagcacagaataatatctttgggtcttactatttttacccataaaagtgaccaggtagaccctttttaattacattcactacttctaccacttgtgtatctctagccaatgtgcttgcaagtgtacagatctgtgtagaggaatgtgtgtatatttacctcttcgtttgctcaaacatgagtgggtatttttttgtttgttttttttgttgttgttgtttttgaggcgcgtctcaccctgttgcccaggctggagtgcaatggcgcgttctctgctcactacagcacccgcttcccaggttgaagtgattctcttgcctcagcctcccgagtagctgggattacaggtgcccaccaccgcgcccagctaattttttaatttttagtagagacagggttttaccatgttggccaggctggtcttgaactcctgaccctcaagtgatctgcccaccttggcctccctaagtgctgggattataggcgtgagccaccatgctcagccattaaggtattttgttaagaactttaagtttagggtaagaagaatgaaaatgatccagaaaaatgcaagcaagtccacatggagatttggaggacactggttaaag

SEQ ID NO: 714 - DNA, 756 bp, Homo sapiens
cggacttggcttgttagaaggctgaaagatgatggcaggaatgaaaatccagcttgtatgcatgctactcctggctttcagctcctggagtctgtgctcagattcagaagaggaaatgaaagcattagaagcagatttcttgaccaatatgcatacatcaaagattagtaaagcacatgttccctcttggaagatgactctgctaaatgtttgcagtcttgtaaataatttgaacagcccagctgaggaaacaggagaagttcatgaagaggagcttgttgcaagaaggaaacttcctactgctttagatggctttagcttggaagcaatgttgacaatataccagctccacaaaatctgtcacagcagggcttttcaacactgggagttaatccaggaagatattcttgatactggaaatgacaaaaatggaaaggaagaagtcataaagagaaaaattccttatattctgaaacggcagctgtatgagaataaacccagaagaccctacatactcaaaagagattcttactattactgagagaataaatcatttatttacatgtgattgtgattcatcatcccttaattaaatatcaaattatatttgtgtgaaaatgtgacaaacacacttatctgtctcttctacaattgtggtttattgaatgtgtttttctgcactaatagaaattagactaagtgttttcaaataaatctaaatcttcaaaaaaaaaaaaaaaaaatggggccgcaatt

SEQ ID NO: 715 - DNA, 4181 bp, Homo sapiens
  misc_feature: n=a,t,g or c
ggtggatgcgtttgggttgtagctaggctttttcttttctttctcttttaaaacacatctagacaaggaaaaaacaagcctcggatctgatttttcactcctcgttcttgtgcttggttcttactgtgtttgtgtattttaaaggcgagaagacgaggggaacaaaaccagctggatccatccatcaccgtgggtggttttaatttttcgttttttctcgttatttttttttaaacaaccactcttcacaatgaacaaactgtatatcggaaacctcagcgagaacgccgccccctcggacctagaaagtatcttcaaggacgccaagatcccggtgtcgggacccttcctggtgaagactggctacgcgttcgtggactgcccggacgagagctgggccctcaaggccatcgaggcgctttcaggtaaaatagaactgcacgggaaacccatagaagttgagcactcggtcccaaaaaggcaaaggattcggaaacttcagatacgaaatatcccgcctcatttacagtgggaggtgctggatagtttactagtccagtatggagtggtggagagctgtgagcaagtgaacactgactcggaaactgcagttgtaaatgtaacctattccagtaaggaccaagctagacaagcactagacaaactgaatggatttcagttagagaatttcaccttgaaagtagcctatatccctgatgaaatggccgcccagcaaaaccccttgcagcagccccgaggtcgccgggggcttgggcagaggggctcctcaaggcaggggtctccaggatccgtatccaagcagaaaccatgtgatttgcctctgcgcctgctggttcccacccaatttgttggagccatcataggaaaagaaggtgccaccattcggaacatcaccaaacagacccagtctaaaatcgatgtccaccgtaaagaaaatgcgggggctgctgagaagtcgattactatcctctctactcctgaaggcacctctgcggcttgtaagtctattctggagattatgcataaggaagctcaagatataaaattcacagaagagatccccttgaagattttagctcataataactttgttggacgtcttattggtaaagaaggaagaaatcttaaaaaaattgagcaagacacagacactaaaatcacgatatctccattgcaggaattgacgctgtataatccagaacgcactattacagttaaaggcaatgttgagacatgtgccaaagctgaggaggagatcatgaagaaaatcagggagtcttatgaaaatgatattgcttctatgaatcttcaagcacatttaattcctggattaaatctgaacgccttgggtctgttcccacccacttcagggatgccacctcccacctcagggcccccttcagccatgactcctccctacccgcagtttgagcaatcagaaacggagactgttcatcagtttatcccagctctatcagtcggtgccatcatcggcaagcagggccagcacatcaagcagctttctcgctttgctggagcttcaattaagattgctccagcggaagcaccagatgctaaagtgaggatggtgattatcactggaccaccagaggctcagttcaaggctcagggaagaatttatggaaaaattaaagaagaaaactttgttagtcctaaagaagaggtgaaacttgaagctcatatcagagtgccatcctttgctgctggcagagttattggaaaaggaggcaaaacggtgaatgaacttcagaatttgtcaagtgcagaagttgttgtccctcgtgaccagacacctgatgagaatgaccaagtggttgtcaaaataactggtcacttctatgcttgccaggttgcccagagaaaaattcaggaaattctgactcaggtaaagcagcaccaacaacagaaggctctgcaaagtggaccacctcagtcaagacggaagtaaaggctcaggaaacagcccaccacagaggcagatgccaaaccaaagacagattgcttaaccaacagatgggcgctgaccccctatccagaatcacatgcacaagtttttacctagccagttgtttctgaggaccaggcaacttttgaactcctgtctctgtgagaatgtatactttatgctctctgaaatgtatgacacccagctttaaaacaaacaaacaaacaaacaaaaaaagggtgggggagggagggaaagagaagagctctgcacttccctttgttgtagtctcacagtataacagatattctaattcttcttaatattcccccataatgccagaaattggcttaatgatgctttcactaaattcatcaaatagattgctcctaaatccaattgttaaaattggatcagaataattatcacaggaacttaaatgttaagccattagcatagaaaaactgttctcagttttatttttacctaacactaacatgagtaacctaagggaagtgctgaatggtgttggcaggggtattaaacgtgcatttttactcaactacctcaggtattcagtaatacaatgaaaagcaaaattgttccttttttttgaaaattttatatactttataatgatagaagtccaaccgttttttaaaaaataaatttaaaatttaacagcaatcagctaacaggcaaattaagatttttacttctggctggtgacagtaaagctggaaaattaatttcagggttttttgaggcttttgacacagttattagttaaatcaaatgttcaaaaatacggagcagtgcctagtatctggagagcagcactaccatttattctttcatttatagttgggaaagtttttgacggtactaacaaagtggtcgcaggagattttggaacggctggtttaaatggcttcaggagacttcagttttttgtttagctacatgattgaatgcataataaatgctttgtgcttctgactatcaatacctaaagaaagtgcatcagtgaagagatgcaagactttcaactgactggcaaaaagcaagctttagcttgtcttataggatgcttagtttgccactacacttcagaccaatgggacagtcatagatggtgtgacagtgtttaaacgcaacaaaaggctacatttccatggggccagcactgtcatgagcctcactaagctattttgaagatttttaagcactgataaattaaaaaaaaaaaaaaaaaattagactccaccttaagtagtaaagtataacaggatttctgtatactgtgcaatcagttctttgaaaaaaaagtcaaaagatagagaatacaagaaaagttttngggatataatttgaatgactgtgaaaacatatgacctttgataacgaactcatttgctcactccttgacagcaaagcccagtacgtacaattgtgttgggtgtgggtggtctccaaggccacgctgctctctgaattgattttttgagttttggnttgnaagatgatcacagncatgttacactgatcttnaaggacatatnttataaccctttaaaaaaaaaatcccctgcctcattcttatttcgagatgaatttcgatacagactagatgtctttctgaagatcaattagacattntgaaaatgatttaaagtgttttccttaatgttctctgaaaacaagtttcttttgtagttttaaccaaaaaagtgccctttttgtcactggtttctcctagcattcatgatttttttttcacacaatgaattaaaattgctaaaatcatggactggctttctggttggatttcaggtaagatgtgtttaaggccagagcttttctcagtatttgatttttttccccaatatttgattttttaaaaatatacacataggagctgcatttaaaacctgctggtttaaattctgtcanatttcacttctagccttttagtatggcnaatcanaatttacttttacttaagcatttgtaatttggagtatctggtactagctaagaaataattcnataattgagttttgtactcnccaaanatgggtcattcctcatgnataatgtncccccaatgcagcttcattttccaganaccttgacgcaggataaattttttcatcatttaggtccccaaaaaaaaaaaaaaaaaaaaaaaaaa

SEQ ID NO: 716 - DNA, 1014 bp, Homo sapiens
gcagaaatagcctagggagatcaaccccgagatgctgaacaaagtgctgtcccggctgggggtcgccggccagtggcgcttcgtggacgtgctggggctggaagaggagtctctgggctcggtgccagcgcctgcctgcgcgctgctgctgctgtttcccctcacggcccagcatgagaacttcaggaaaaagcagattgaagagctgaagggacaagaagttagtcctaaagtgtacttcatgaagcagaccattgggaattcctgtggcacaatcggacttattcacgcagtggccaataatcaagacaaactgggatttgaggatggatcagttctgaaacagtttctttctgaaacagagaaaatgtcccctgaagacagagcaaaatgctttgaaaagaatgaggccatacaggcagcccatgatgccgtggcacaggaaggccaatgtcgggtagatgacaaggtgaatttccattttattctgtttaacaacgtggatggccacctctatgaacttgatggacgaatgccttttccggtgaaccatggcgccagttcagaggacaccctgctgaaggacgctgccaaggtgtgcagagaattcaccgagcgtgagcaaggagaagtccgcttctctgccgtggctctctgcaaggcagcctaatgctctgtgggagggactttgctgatttcccctcttcccttcaacatgaaaatatataccccccatgcagtctaaaatgcttcagtacttgtgaaacacagctgttcttctgttctgcagacacgccttcccctcagccacacccaggcacttaagcacaagcagagtgcacagctgtccactgggccattgtggtgtgagcttcagatggtgaagcattctccccagtgtatgtcttgtatccgatatctaacgctttaaatggctactttggtttctgtctgtaagttaagaccttggatgtggttatgttgtcctaaagaataaattttgctgatagtagc

SEQ ID NO: 717 - DNA, 1801 bp, Homo sapiens
gcaaggcatagagacaacatagagctaagtaaagccagtggaaatgaagagtcttccaatcctactgttgctgtgcgtggcagtttgctcagcctatccattggatggagctgcaaggggtgaggacaccagcatgaaccttgttcagaaatatctagaaaactactacgacctcaaaaaagatgtgaaacagtttgttaggagaaaggacagtggtcctgttgttaaaaaaatccgagaaatgcagaagttccttggattggaggtgacggggaagctggactccgacactctggaggtgatgcgcaagcccaggtgtggagttcctgatgttggtcacttcagaacctttcctggcatcccgaagtggaggaaaacccaccttacatacaggattgtgaattatacaccagatttgccaaaagatgctgttgattctgctgttgagaaagctctgaaagtctgggaagaggtgactccactcacattctccaggctgtatgaaggagaggctgatataatgatctcttttgcagttagagaacatggagacttttacccttttgatggacctggaaatgttttggcccatgcctatgcccctgggccagggattaatggagatgcccactttgatgatgatgaacaatggacaaaggatacaacagggaccaatttatttctcgttgctgctcatgaaattggccactccctgggtctctttcactcagccaacactgaagctttgatgtacccactctatcactcactcacagacctgactcggttccgcctgtctcaagatgatataaatggcattcagtccctctatggacctccccctgactcccctgagacccccctggtacccacggaacctgtccctccagaacctgggacgccagccaactgtgatcctgctttgtcctttgatgctgtcagcactctgaggggagaaatcctgatctttaaagacaggcacttttggcgcaaatccctcaggaagcttgaacctgaattgcatttgatctcttcattttggccatctcttccttcaggcgtggatgccgcatatgaagttactagcaaggacctcgttttcatttttaaaggaaatcaattctgggccatcagaggaaatgaggtacgagctggatacccaagaggcatccacaccctaggtttccctccaaccgtgaggaaaatcgatgcagccatttctgataaggaaaagaacaaaacatatttctttgtagaggacaaatactggagatttgatgagaagagaaattccatggagccaggctttcccaagcaaatagctgaagactttccagggattgactcaaagattgatgctgtttttgaagaatttgggttcttttatttctttactggatcttcacagttggagtttgacccaaatgcaaagaaagtgacacacactttgaagagtaacagctggcttaattgttgaaagagatatgtagaaggcacaatatgggcactttaaatgaagctaataattcttcacctaagtctctgtgaattgaaatgttcgttttctcctgcctgtgctgtgactcgagtcacactcaagggaacttgagcgtgaatctgtatcttgccggtcatttttatgttattacagggcattcaaatgggctgctgcttagcttgcaccttgtcacatagagtgatctttcccaagagaaggggaagcactcgtgtgcaacagacaagtgactgtatctgtgtagactatttgcttatttaataaagacgatttgtcagttgtttt

SEQ ID NO: 718 - DNA, 1050 bp, Homo sapiens; identical to SEQ ID NO: 84

SEQ ID NO: 719 - DNA, 2627 bp, Homo sapiens; identical to SEQ ID NO: 85

SEQ ID NO: 720 - DNA, 3020 bp, Homo sapiens
gttcaaggcagcgcccacacccgggggctctccgcaacccgaccgcctgtccgctcccccacttcccgccctccctcccacctactcattcacccacccacccacccagagccgggacggcagcccaggcgcccgggccccgccgtctcctcgccgcgatcctggacttcctcttgctgcaggacccggcttccacgtgtgtcccggagccggcgtctcagcacacgctccgctccgggcctgggtgcctacagcagccagagcagcagggagtccgggacccgggcggcatctgggccaagttaggcgccgccgaggccagcgctgaacgtctccagggccggaggagccgcggggcgtccgggtctgagcctcagcaaatgggctccgacgtgcgggacctgaacgcgctgctgcccgccgtcccctccctgggtggcggcggcggctgtgccctgcctgtgagcggcgcggcgcagtgggcgccggtgctggactttgcgcccccgggcgcttcggcttacgggtcgttgggcggccccgcgccgccaccggctccgccgccacccccgccgccgccgcctcactccttcatcaaacaggagccgagctggggcggcgcggagccgcacgaggagcagtgcctgagcgccttcactgtccacttttccggccagttcactggcacagccggagcctgtcgctacgggcccttcggtcctcctccgcccagccaggcgtcatccggccaggccaggatgtttcctaacgcgccctacctgcccagctgcctcgagagccagcccgctattcgcaatcagggttacagcacggtcaccttcgacgggacgcccagctacggtcacacgccctcgcaccatgcggcgcagttccccaaccactcattcaagcatgaggatcccatgggccagcagggctcgctgggtgagcagcagtactcggtgccgcccccggtctatggctgccacacccccaccgacagctgcaccggcagccaggctttgctgctgaggacgccctacagcagtgacaatttataccaaatgacatcccagcttgaatgcatgacctggaatcagatgaacttaggagccaccttaaagggagttgctgctgggagctccagctcagtgaaatggacagaagggcagagcaaccacagcacagggtacgagagcgataaccacacaacgcccatcctctgcggagcccaatacagaatacacacgcacggtgtcttcagaggcattcaggatgtgcgacgtgtgcctggagtagccccgactcttgtacggtcggcatctgagaccagtgagaaacgccccttcatgtgtgcttacccaggctgcaataagagatattttaagctgtcccacttacagatgcacagcaggaagcacactggtgagaaaccataccagtgtgacttcaaggactgtgaacgaaggttttctcgttcagaccagctcaaaagacaccaaaggagacatacaggtgtgaaaccattccagtgtaaaacttgtcagcgaaagttctcccggtccgaccacctgaagacccacaccaggactcatacaggtaaaacaagtgaaaagcccttcagctgtcggtggccaagttgtcagaaaaagtttgcccggtcagatgaattagtccgccatcacaacatgcatcagagaaacatgaccaaactccagctggcgctttgaggggtctccctcggggaccgttcagtgtcccaggcagcacagtgtgtgaactgctttcaagtctgactctccactcctcctcactaaaaaggaaacttcagttgatcttcttcatccaacttccaagacaagataccggtgcttctggaaactaccaggtgtgcctggaagagttggtctctgccctgcctacttttagttgactcacaggccctggagaagcagctaacaatgtctggttagttaaaagcccattgccatttggtctggattttctactgtaagaagagccatagctgatcatgtccccctgacccttcccttctttttttatgctcgttttcgctggggatggaattattgtaccattttctatcatggaatatttataggccagggcatgtgtatgtgtctgctaatgtaaactttgtcatggtttccatttactaacagcaacagcaagaaataaatcagagagcaaggcatcgggggtgaatcttgtctaacattcccgaggtcagccaggctgctaacctggaaagcaggatgtagttctgccaggcaacttttaaagctcatgcatttcaagcagctgaagaaagaatcagaactaaccagtacctctgtatagaaatctaaaagaattttaccattcagttaattcaatgtgaacactggcacactgctcttaagaaactatgaagatctgagatttttttgtgtatgtttttgactcttttgagtggtaatcatatgtgtctttatagatgtacatacctccttgcacaaatggaggggaattcattttcatcactgggactgtccttagtgtataaaaaccatgctggtatatggcttcaagttgtaaaaatgaaagtgactttaaaagaaaataggggatggtccaggatctccactgataagactgtttttaagtaacttaaggacctttgggtctacaagtatatgtgaaaaaaatgagacttactgggtgaggaaatccattgtttaaagatggtcgtgtgtgtgtgtgtgtgtgtgtgtgtgttgtgttgtgttttgttttttaagggagggaatttattatttaccgttgcttgaaattactgtgtaaatatatgtctgataatgatttgctctttgacaactaaaattaggactgtataagtactagatgcatcactgggtgttgatcttacaagatattgatgataacacttaaaattgtaacctgcatttttcactttgctctcaattaaagtctattcaaaaggaaaaaaaaaaaaaaaa

SEQ ID NO: 721 - DNA, 5994 bp, Homo sapiens
gcgctgcccgcctcgtccccaccccccaaccccccgcgcccgccctcggacagtccctgctcgcccgcgcgctgcagccccatctcctagcggcagcccaggcgcggagggagcgagtccgccccgaggtaggtccaggacgggcgcacagcagcagccgaggctggccgggagagggaggaagaggatggcagggccacgccccagcccatgggccaggctgctcctggcagccttgatcagcgtcagcctctctgggaccttggcaaaccgctgcaagaaggccccagtgaagagctgcacggagtgtgtccgtgtggataaggactgcgcctactgcacagacgagatgttcagggaccggcgctgcaacacccaggcggagctgctggccgcgggctgccagcgggagagcatcgtggtcatggagagcagcttccaaatcacagaggagacccagattgacaccaccctgcggcgcagccagatgtccccccaaggcctgcgggtccgtctgcggcccggtgaggagcggcattttgagctggaggtgtttgagccactggagagccccgtggacctgtacatcctcatggacttctccaactccatgtccgatgatctggacaacctcaagaagatggggcagaacctggctcgggtcctgagccagctcaccagcgactacactattggatttggcaagtttgtggacaaagtcagcgtcccgcagacggacatgaggcctgagaagctgaaggagccctggcccaacagtgacccccccttctccttcaagaacgtcatcagcctgacagaagatgtggatgagttccggaataaactgcagggagagcggatctcaggcaacctggatgctcctgagggcggcttcgatgccatcctgcagacagctgtgtgcacgagggacattggctggcgcccggacagcacccacctgctggtcttctccaccgagtcagccttccactatgaggctgatggcgccaacgtgctggctggcatcatgagccgcaacgatgaacggtgccacctggacaccacgggcacctacacccagtacaggacacaggactacccgtcggtgcccaccctggtgcgcctgctcgccaagcacaacatcatccccatctttgctgtcaccaactactcctatagctactacgagaagcttcacacctatttccctgtctcctcactgggggtgctgcaggaggactcgtccaacatcgtggagctgctggaggaggccttcaatcggatccgctccaacctggacatccgggccctagacagcccccgaggccttcggacagaggtcacctccaagatgttccagaagacgaggactgggtcctttcacatccggcggggggaagtgggtatataccaggtgcagctgcgggcccttgagcacgtggatgggacgcacgtgtgccagctgccggaggaccagaagggcaacatccatctgaaaccttccttctccgacggcctcaagatggacgcgggcatcatctgtgatgtgtgcacctgcgagctgcaaaaagaggtgcggtcagctcgctgcagcttcaacggagacttcgtgtgcggacagtgtgtgtgcagcgagggctggagtggccagacctgcaactgctccaccggctctctgagtgacattcagccctgcctgcgggagggcgaggacaagccgtgctccggccgtggggagtgccagtgcgggcactgtgtgtgctacggcgaaggccgctacgagggtcagttctgcgagtatgacaacttccagtgtccccgcacttccgggttcctgtgcaatgaccgaggacgctgctccatgggccagtgtgtgtgtgagcctggttggacaggcccaagctgtgactgtcccctcagcaatgccacctgcatcgacagcaatgggggcatctgtaatggacgtggccactgtgagtgtggccgctgccactgccaccagcagtcgctctacacggacaccatctgcgagatcaactactcggcgatccacccgggcctctgcgaggacctacgctcctgcgtgcagtgccaggcgtggggcaccggcgagaagaaggggcgcacgtgtgaggaatgcaacttcaaggtcaagatggtggacgagcttaagagagccgaggaggtggtggtgcgctgctccttccgggacgaggatgacgactgcacctacagctacaccatggaaggtgacggcgcccctgggcccaacagcactgtcctggtgcacaagaagaaggactgccctccgggctccttctggtggctcatccccctgctcctcctcctcctgccgctcctggccctgctactgctgctatgctggaagtactgtgcctgctgcaaggcctgcctggcacttctcccgtgctgcaaccgaggtcacatggtgggctttaaggaagaccactacatgctgcgggagaacctgatggcctctgaccacttggacacgcccatgctgcgcagcgggaacctcaagggccgtgacgtggtccgctggaaggtcaccaacaacatgcagcggcctggctttgccactcatgccgccagcatcaaccccacagagctggtgccctacgggctgtccttgcgcctggcccgcctttgcaccgagaacctgctgaagcctgacactcgggagtgcgcccagctgcgccaggaggtggaggagaacctgaacgaggtctacaggcagatctccggtgtacacaagctccagcagaccaagttccggcagcagcccaatgccgggaaaaagcaagaccacaccattgtggacacagtgctgatggcgccccgctcggccaagccggccctgctgaagcttacagagaagcaggtggaacagagggccttccacgacctcaaggtggcccccggctactacaccctcactgcagaccaggacgcccggggcatggtggagttccaggagggcgtggagctggtggacgtacgggtgcccctctttatccggcctgaggatgacgacgagaagcagctgctggtggaggccatcgacgtgcccgcaggcactgccaccctcggccgccgcctggtaaacatcaccatcatcaaggagcaagccagagacgtggtgtcctttgagcagcctgagttctcggtcagccgcggggaccaggtggcccgcatccctgtcatccggcgtgtcctggacggcgggaagtcccaggtctcctaccgcacacaggatggcaccgcgcagggcaaccgggactacatccccgtggagggtgagctgctgttccagcctggggaggcctggaaagagctgcaggtgaagctcctggagctgcaagaagttgactccctcctgcggggccgccaggtccgccgtttccacgtccagctcagcaaccctaagtttggggcccacctgggccagccccactccaccaccatcatcatcagggacccagatgaactggaccggagcttcacgagtcagatgttgtcatcacagccaccccctcacggcgacctgggcgccccgcagaaccccaatgctaaggccgctgggtccaggaagatccatttcaactggctgcccccttctggcaagccaatggggtacagggtaaagtactggattcagggcgactccgaatccgaagcccacctgctcgacagcaaggtgccctcagtggagctcaccaacctgtacccgtattgcgactatgagatgaaggtgtgcgcctacggggctcagggcgagggaccctacagctccctggtgtcctgccgcacccaccaggaagtgcccagcgagccagggcgtctggccttcaatgtcgtctcctccacggtgacccagctgagctgggctgagccggctgagaccaacggtgagatcacagcctacgaggtctgctatggcctggtcaacgatgacaaccgacctattgggcccatgaagaaagtgctggttgacaaccctaagaaccggatgctgcttattgagaaccttcgggagtcccagccctaccgctacacggtgaaggcgcgcaacggggccggctgggggcctgagcgggaggccatcatcaacctggccacccagcccaagaggcccatgtccatccccatcatccctgacatccctatcgtggacgcccagagcggggaggactacgacagcttccttatgtacagcgatgacgttctacgctctccatcgggcagccagaggcccagcgtctccgatgacactggctgcggctggaagttcgagcccctgctgggggaggagctggacctgcggcgcgtcacgtggcggctgcccccggagctcatcccgcgcctgtcggccagcagcgggcgctcctccgacgccgaggcccccacggccccccggacgacggcggcgcgggcgggaagggcggcagccgtgccccgcagtgcgacacccgggccccccggagagcacctggtgaatggccggatggactttgccttcccgggcagcaccaactccctgcacaggatgaccacgaccagtgctgctgcctatggcacccacctgagcccacacgtgccccaccgcgtgctaagcacatcctccaccctcacacgggactacaactcactgacccgctcagaacactcacactcgaccacactgcccagggactactccaccctcacctccgtctcctcccacgactctcgcctgactgctggtgtgcccgacacgcccacccgcctggtgttctctgccctggggcccacatctctcagagtgagctggcaggagccgcggtgcgagcggccgctgcagggctacagtgtggagtaccagctgctgaacggcggtgagctgcatcggctcaacatccccaaccctgcccagacctcggtggtggtggaagacctcctgcccaaccactcctacgtgttccgcgtgcgggcccagagccaggaaggctggggccgagagcgtgagggtgtcatcaccattgaatcccaggtgcacccgcagagcccactgtgtcccctgccaggctccgccttcactttgagcactcccagtgccccaggcccgctggtgttcactgccctgagcccagactcgctgcagctgagctgggagcggccacggaggcccaatggggatatcgtcggctacctggtgacctgtgagatggcccaaggaggagggccagccaccgcattccgggtggatggagacagccccgagagccggctgaccgtgccgggcctcagcgagaacgtgccctacaagttcaaggtgcaggccaggaccactgagggcttcgggccagagcgcgagggcatcatcaccatagagtcccaggatggaggacccttcccgcagctgggcagccgtgccgggctcttccagcacccgctgcaaagcgagtacagcagcatcaccaccacccacaccagcgccaccgagcccttcctagtggatgggctgaccctgggggcccagcacctggaggcaggcggctccctcacccggcatgtgacccaggagtttgtgagccggacactgaccaccagcggaacccttagcacccacatggaccaacagttcttccaaacttgaccgcaccctgccccacccccgccatgtcccactaggcgtcctcccgactcctctcccggagcctcctcagctactccatccttgcacccctgggggcccagcccacccgcatgcacagagcaggggctaggtgtctcctgggaggcatgaagggggcaaggtccgtcctctgtgggcccaaacctatttgtaaccaaagagctgggagcagcacaaggacccagcctttgttctgcacttaataaatggttttgctactgctaaaaaaaaaaaaaaaaaaaaaaaaaaaaaaaaaaaaaaaaaaaaaaaaaaaaaaaaaaaaaaaaaaaaaaaaaaaa

SEQ ID NO: 722 - DNA, 1782 bp, Homo sapiens; identical to SEQ ID NO: 87

SEQ ID NO: 723 - DNA, 1840 bp, Homo sapiens
ggaagaggtaagcggttactcactccatggctgcagcaaggagaggcggcggcggcctcggctgaagaaagaagaaatcttcccaaggctgcagacaccgacggatttgctttgggagccagagtagctgccgccaccagagtccggagccatgagcggctttaattttggaggcactggggcccctacaggcgggttcacgtttggcactgcaaagacggcaacaaccacacctgctacagggttttctttctccacctctggcactggagggtttaattttggggctcccttccaaccagccacaagtaccccttccaccggcctgttctcacttgccacccagactccggccacacagacgacaggcttcacttttggaacagcgactcttgcttcggggggaactggattttctttggggatcggtgcttcaaagctcaacttgagcaacacagctgccaccccagccatggcaaaccccagcggctttgggctgggcagcagcaacctcactaatgccatatcgagcaccgtcacctccagccagggcacagcacccaccggctttgtgtttggcccctccaccacctctgtggctccagctaccacatctggaggcttctcattcactggtggaagcacggcccaaccctccggtttcaacattggctcagcagggaattcagcccagcccacggcacctgccacgttgcccttcactccggccacgccagcagccaccacagcaggtgccacacagccagctgctcccacacccacagccaccatcaccagtactgggcccagcctctttgcgtcaatagcaactgctccaacctcatctgccaccactggactctccctctgtacccctgtgaccacagcgggcgcccccactgctgggacacagggattcagcttaaaggcacctggagcagcttccggcacctccacaacaacatccaccgctgccaccgccaccgccaccaccaccaccagcagcagcaccaccggctttgccttgaatttaaaaccactggcgccagccgggatccccagcaatacagcagctgccgtgaccgctccacctggccctggcgcagctgcaggggcggctgccagctccgccatgacctacgcgcagctggagagcctgatcaacaaatggagcctggagctagaggaccaggagcggcacttcctccagcaggccacccaggtcaacgcctgggaccgcacgctgatcgagaatggagaaaagatcaccagcctgcaccgcgaggtggagaaggtgaagctggaccagaagaggctggaccaggagctcgacttcatcctgtcccagcagaaggagctggaagacctgctgagcccactggaggagttggtcaaggagcagagggcgaccatctacctgcagcacgcggatgaggagcgtcagaaaacctacaagctggctgagaacatcgacgcacagctcaagcgcatggcccaggatctcaaggacatcatcgagcacctgaacacgtccggggcccccgccgacaccagtgacccactgcagcagatctgcaagatcctcaatgcgcacatggactcactgcagtggatcgaccagaactcggccctgctgcagaggaaggtggaggaggtgaccaaggtgtgcgtgggccggcgcaaggagcaggagcgcagcttccggatcacctttgactgagcgacagcagccctggggcccgcaggtccctagggagttcatgaggggaatgcgccctgttgtctgtagtttggggttgtggcaagatacttgtttgtttgtttctttctttcacagacg

SEQ ID NO: 724 - DNA, 2500 bp, Homo sapiens
cccaggcgcagccaatgggaagggtcggaggcatggcacagccaatgggaagggccggggcaccaaagccaatgggaagggccgggagcgcgcggcgcgggagatttaaaggctgctggagtgaggggtcgcccgtgcaccctgtcccagccgtcctgtcctggctgctcgctctgcttcgctgcgcctccactatgctctccctccgtgtcccgctcgcgcccatcacggacccgcagcagctgcagctctcgccgctgaaggggctcagcttggtcgacaaggagaacacgccgccggccctgagcgggacccgcgtcctggccagcaagaccgcgaggaggatcttccaggagcccacggagccgaaaactaaagcagctgcccccggcgtggaggatgagccgctgctgagagaaaacccccgccgctttgtcatcttccccatcgagtaccatgatatctggcagatgtataagaaggcagaggcttccttttggaccgccgaggaggttgacctctccaaggacattcagcactgggaatccctgaaacccgaggagagatattttatatcccatgttctggctttctttgcagcaagcgatggcatagtaaatgaaaacttggtggagcgatttagccaagaagttcagattacagaagcccgctgtttctatggcttccaaattgccatggaaaacatacattctgaaatgtatagtcttcttattgacacttacataaaagatcccaaagaaagggaatttctcttcaatgccattgaaacgatgccttgtgtcaagaagaaggcagactgggccttgcgctggattggggacaaagaggctacctatggtgaacgtgttgtagcctttgctgcagtggaaggcattttcttttccggttcttttgcgtcgatattctggctcaagaaacgaggactgatgcctggcctcacattttctaatgaacttattagcagagatgagggtttacactgtgattttgcttgcctgatgttcaaacacctggtacacaaaccatcggaggagagagtaagagaaataattatcaatgctgttcggatagaacaggagttcctcactgaggccttgcctgtgaagctcattgggatgaattgcactctaatgaagcaatacattgagtttgtggcagacagacttatgctggaactgggttttagcaaggttttcagagtagagaacccatttgactttatggagaatatttcactggaaggaaagactaacttctttgagaagagagtaggcgagtatcagaggatgggagtgatgtcaagtccaacagagaattcttttaccttggatgctgacttctaaatgaactgaagatgtgcccttacttggctgattttttttttccatctcataagaaaaatcagctgaagtgttaccaactagccacaccatgaattgtccgtaatgttcattaacagcatctttaaaactgtgtagctacctcacaaccagtcctgtctgtttatagtgctggtagtatcaccttttgccagaaggcctggctggctgtgacttaccatagcagtgacaatggcagtcttggctttaaagtgaggggtgaccctttagtgagcttagcacagcgggattaaacagtcctttaaccagcacagccagttaaaagatgcagcctcactgcttcaacgcagattttaatgtttacttaaatataaacctggcactttacaaacaaataaacattgttttgtactcacggcggcgataatagcttgatttatttggtttctacaccaaatacattctcctgaccactaatgggagccaattcacaattcactaagtgactaaagtaagttaaacttgtgtagactaagcatgtaatttttaagttttattttaatgaattaaaatatttgttaaccaactttaaagtcagtcctgtgtatacctagatattagtcagttggtgccagatagaagacaggttgtgtttttatcctgtggcttgtgtagtgtcctgggattctctgccccctctgagtagagtgttgtgggataaaggaatctctcagggcaaggagcttcttaagttaaatcactagaaatttaggggtgatctgggccttcatatgtgtgagaagccgtttcattttatttctcactgtattttcctcaacgtctggttgatgagaaaaaattcttgaagagttttcatatgtgggagctaaggtagtattgtaaaatttcaagtcatccttaaacaaaatgatccacctaagatcttgcccctgttaagtggtgaaatcaactagaggtggttcctacaagttgttcattctagttttgtttggtgtaagtaggttgtgtgagttaattcatttatatttactatgtctgttaaatcagaaattttttattatctatgttcttctagattttacctgtagttcataaaaaaaaaaaaaaaaaaaaaaaaa

SEQ ID NO: 725 - DNA, 3226 bp, Homo sapiens
aatccatctgagaatatgctgccacaaataccctttttgctgctagtatccttgaacttggttcatggagtgttttacgctgaacgataccaaacgcccacaggcataaaaggcccactacccaacaccaagacacagttcttcattccctacaccataaagagtaaaggtatagcagtaagaggagagcaaggtactcctggtccaccaggccctgctggacctcgagggcacccaggtccttctggaccaccaggaaaaccaggctacggaagtcctggactccaaggagagccagggttgccaggaccaccgggaccatcagctgtagggaaaccaggtgtgccaggactcccaggaaaaccaggagagagaggaccatatggaccaaaaggagatgttggaccagctggcctaccaggaccccggggcccaccaggaccacctggaatccctggaccggctggaatttctgtgccaggaaaacctggacaacagggacccacaggagccccaggacccaggggctttcctggagaaaagggtgcaccaggagtccctggtatgaatggacagaaaggggaaatgggatatggtgctcctggtcgtccaggtgagaggggtcttccaggccctcagggtcccacaggaccatctggccctcctggagtgggaaaaagaggtgaaaatggggttccaggacagccaggcatcaaaggtgatagaggttttccgggagaaatgggaccaattggcccaccaggtccccaaggccctcctggggaacgagggccagaaggcattggaaagccaggagctgctggagccccaggccagccagggattccaggaacaaaaggtctccctggggctccaggaatagctgggcccccagggcctcctggctttgggaaaccaggcttgccaggcctgaagggagaaagaggacctgctggccttcctgggggtccaggtgccaaaggggaacaagggccagcaggtcttcctgggaagccaggtctgactggaccccctgggaatatgggaccccaaggaccaaaaggcatcccgggtagccatggtctcccaggccctaaaggtgagacagggccagctgggcctgcaggataccctggggctaagggtgaaaggggttcccctgggtcagatggaaaaccagggtacccaggaaaaccaggtctcgatggtcctaagggtaacccagggttaccaggtccaaaaggtgatcctggagttggaggacctcctggtctcccaggccctgtgggcccagcaggagcaaagggaatgcccggacacaatggagaggctggcccaagaggtgcccctggaataccaggtactagaggccctattgggccaccaggcattccaggattccctgggtctaaaggggatccaggaagtcccggtcctcctggcccagctggcatagcaactaagggcctcaatggacccaccgggccaccagggcctccaggtccaagaggcccctctggagagcctggtcttccagggccccctgggcctccaggcccaccaggtcaagcagtcatgcctgagggttttataaaggcaggccaaaggcccagtctttctgggacccctcttgttagtgccaaccagggggtaacaggaatgcctgtgtctgcttttactgttattctctccaaagcttacccagcaataggaactcccataccatttgataaaattttgtataacaggcaacagcattatgacccaaggactggaatctttacttgtcagataccaggaatatactatttttcataccacgtgcatgtgaaagggactcatgtttgggtaggcctgtataagaatggcacccctgtaatgtacacctatgatgaatacaccaaaggctacctggatcaggcttcagggagtgccatcatcgatctcacagaaaatgaccaggtgtggctccagcttcccaatgccgagtcaaatggcctatactcctctgagtatgtccactcctctttctcaggattcctagtggctccaatgtgagtacaccccacagagctaatctaaatcttgtgctagaaaaagcattctctaactctaccccaccctacaaaatgcatatggaggtaggctgaaaagaatgtaatttttattttctgaaatacagatttgagctatcagaccaacaaaccttccccctgaaaagtgagcagcaacgtaaaaacgtatgtgaagcctctcttgaatttctagttagcaatcttaaggctctttaaggttttctccaatattaaaaaatatcaccaaagaagtcctgctatgttaaaaacaaacaacaaaaaacaaagcaacaaaaaaaaaaattaaaaaaaaaaacagaaatagagctctaagttatgtgaaatttgatttgagaaactcggcatttcctttttaaaaaagcctgtttctaactatgaatatgagaacttctaggaaacatccaggaggtatcatataactttgtagaacttaaatacttgaatattcaaatttaaaagacactgtatcccctaaaatatttctgatggtgcactactctgaggcctgtatggcccctttcatcaatatctattcaaatatacaggtgcatatatacttgttaaagctcttatataaaaaagccccaaaatattgaagttcatctgaaatgcaaggtgctttcatcaatgaaccttttcaaaacttttctatgattgcagagaagctttttatatacccagcataacttggaaacaggtatctgacctattcttatttagttaacacaagtgtgattaatttgatttctttaattccttattgaatcttatgtgatatgattttctggatttacagaacattagcacatgtaccttgtgcctcccattcaagtgaagttataatttacactgagggtttcaaaattcgactagaagtggagatatattatttatttatgcactgtactgtatttttatattgctgtttaaaacttttaagctgtgcctcacttattaaagcacaaaatgttttacctactccttatttacgacacaataaaataacatcaatagatttttaggctgaattaatttgaaagcagcaatttgctgttctcaaccattctttcaaggcttttcattcgacacaataaaataacatcaatagatttttagggatgggtggcttt

SEQ ID NO: 726 - DNA, 1552 bp, Homo sapiens; identical to SEQ ID NO: 89

SEQ ID NO: 727 - DNA, 3348 bp, Homo sapiens; identical to SEQ ID NO: 90

SEQ ID NO: 728 - DNA, 971 bp, Homo sapiens
cggcctctctgcggggctcactctgcgcttcaccatggctttcattgccaagtccttctatgacctcagtgccatcagcctggatggggagaaggtagatttcaatacgttccggggcagggccgtgctgattgagaatgtggcttcgctctgaggcacaaccacccgggacttcacccagctcaacgagctgcaatgccgctttcccaggcgcctggtggtccttggcttcccttgcaaccaatttggacatcaggagaactgtcagaatgaggagatcctgaacagtctcaagtatgtccgtcctgggggtggataccagcccaccttcacccttgtccaaaaatgtgaggtgaatgggcagaacgagcatcctgtcttcgcctacctgaaggacaagctcccctacccttatgatgacccattttccctcatgaccgatcccaagctcatcatttggagccctgtgcgccgctcagatgtggcctggaactttgagaagttcctcatagggccggagggagagcccttccgacgctacagccgcaccttcccaaccatcaacattgagcctgacatcaagcgcctccttaaagttgccatatagatgtgaactgctcaacacacagatctcctactccatccagtcctgaggagccttaggatgcagcatgccttcaggagacactgctggacctcagcattcccttgatatcagtccccttcactgcagagccttgcctttcccctctgcctgtttccttttcctctcccaaccctctggttggtgattcaacttgggctccaagacttgggtaagctctgggccttcacagaatgatggcaccttcctaaaccctcatgggtggtgtctgagaggcgtgaagggcctggagccactctgctagaagagaccaataaagggcaggtgtggaaacggcaaaaaaaaaaaaaaaaaaaaaaaaaaaaaa

SEQ ID NO: 729 - DNA, 4119 bp, Homo sapiens
ctggagagcctgctgcccgcccgcccgtaaaatggtcccctcggctggacagctcgccctgttcgctctgggtattgtgttggctgcgtgccaggccttggagaacagcacgtccccgctgagtgcagacccgcccgtggctgcagcagtggtgtcccattttaatgactgcccagattcccacactcagttctgcttccatggaacctgcaggtttttggtgcaggaggacaagccagcatgtgtctgccattctgggtacgttggtgcacgctgtgagcatgcggacctcctggccgtggtggctgccagccagaagaagcaggccatcaccgccttggtggtggtctccatcgtggccctggctgtccttatcatcacatgtgtgctgatacactgctgccaggtccgaaaacactgtgagtggtgccgggccctcatctgccggcacgagaagcccagcgccctcctgaagggaagaaccgcttgctgccactcagaaacagtggtctgaagagcccagaggaggagtttggccaggtggactgtggcagatcaataaagaaaggcttcttcaggacagcactgccagagatgcctgggtgtgccacagaccttcctacttggcctgtaatcacctgtgcagccttttgtgggccttcaaaactctgtcaagaactccgtctgcttggggttattcagtgtgacctagagaagaaatcagcggaccacgatttcaagacttgttaaaaaagaactgcaaagagacggactcctgttcacctaggtgaggtgtgtgcagcagttggtgtctgagtccacatgtgtgcagttgtcttctgccagccatggattccaggctatatatttctttttaatgggccacctccccacaacagaattctgcccaacacaggagatttctatagttattgttttctgtcatttgcctactggggaagaaagtgaaggaggggaaactgtttaatatcacatgaagaccctagctttaagagaagctgtatcctctaaccacgagactctcaaccagcccaacatcttccatggacacatgacattgaagaccatcccaagctatcgccacccttggagatgatgtcttatttattagatggataatggttttatttttaatctcttaagtcaatgtaaaaagtataaaaccccttcagacttctacattaatgatgtatgtgttgctgactgaaaagctatactgattagaaatgtctggcctcttcaagacagctaaggcttgggaaaagtcttccagggtgcggagatggaaccagaggctgggttactggtaggaataaaggtaggggttcagaaatggtgccattgaagccacaaagccggtaaatgcctcaatacgttctgggagaaaacttagcaaatccatcagcagggatctgtcccctctgttggggagagaggaagagtgtgtgtgtctacacaggataaacccaatacatattgtactgctcagtgattaaatgggttcacttcctcgtgagccctcggtaagtatgtttagaaatagaacattagccacgagccataggcatttcaggccaaatccatgaaagggggaccagtcatttattttccattttgttgcttggttggtttgttgctttatttttaaaaggagaagtttaactttgctatttattttcgagcactaggaaaactattccagtaatttttttttcctcatttccattcaggatgccggctttattaacaaaaactctaacaagtcacctccactatgtgggtcttcctttcccctcaagagaaggagcaattgttcccctgacatctgggtccatctgacccatggggcctgcctgtgagaaacagtgggtcccttcaaatacatagtggatagctcatccctaggaattttcattaaaatttggaaacagagtaatgaagaaataatatataaactccttatgtgaggaaatgctactaatatctgaaaagtgaaagatttctatgtattaactcttaagtgcacctagcttattacatcgtgaaaggtacatttaaaatatgttaaattggcttgaaattttcagagaattttgtcttcccctaattcttcttccttggtctggaagaacaatttctatgaattttctctttattttttttttataattcagacaattctatgacccgtgtcttcatttttggcactcttatttaacaatgccacacctgaagcacttggatctgttcagagctgaccccctagcaacgtagttgacacagctccaggtttttaaattactaaaataagttcaagtttacatcccttgggccagatatgtgggttgaggcttgactgtagcatcctgcttagagaccaatcaatggacactggtttttagacctctatcaatcagtagttagcatccaagagactttgcagaggcgtaggaatgaggctggacagatggcggaacgagaggttccctgcgaagacttgagatttagtgtctgtgaatgttctagttcctaggtccagcaagtcacacctgccagtgccctcatccttatgcctgtaacacacatgcagtgagaggcctcacatatacgcctccctagaagtgccttccaagtcagtcctttggaaaccagcaggtctgaaaaagaggctgcatcaatgcaagcctggttggaccattgtccatgcctcaggatagaacagcctggcttatttggggatttttcttctagaaatcaaatgactgataagcattggctccctctgccatttaatggcaatggtagtctttggttagctgcaaaaatactccatttcaagttaaaaatgcatcttctaatccatctctgcaagctccctgtgtttccttgccctttagaaaatgaattgttcactacaattagagaatcatttaacatcctgacctggtaagctgccacacacctggcagtggggagcatcgctgtttccaatggctcaggagacaatgaaaagcccccatttaaaaaaataacaaacattttttaaaaggcctccaatactcttatggagcctggatttttcccactgctctacaggctgtgactttttttaagcatcctgacaggaaatgttttcttctacatggaaagatagacagcagccaaccctgatctggaagacagggccccggctggacacacgtggaaccaagccagggatgggctggccattgtgtccccgcaggagagatgggcagaatggccctagagttcttttccctgagaaaggagaaaaagatgggattgccactcacccacccacactggtaagggaggagaatttgtgcttctggagcttctcaagggattgtgttttgcaggtacagaaaactgcctgttatcttcaagccaggttttcgagggcacatgggtcaccagttgctttttcagtcaatttggccgggatggactaatgaggctctaacactgctcaggagacccctgccctctagttggttctgggctttgatctcttccaacctgcccagtcacagaaggaggaatgactcaaatgcccaaaaccaagaacacattgcagaagtaagacaaacatgtatatttttaaatgttctaacataagacctgttctctctagccattgatttaccaggctttctgaaagatctagtggttcacacagagagagagagagtactgaaaaagcaactcctcttcttagtcttaataatttactaaaatggtcaacttttcattatctttattataataaacctgatgcttttttttagaactccttactctgatgtctgtatatgttgcactgaaaaggttaatatttaatgttttaatttattttgtgtggtaagttaattttgatttctgtaatgtgttaatgtgattagcagttattttccttaatatctgaattatacttaaagagtagtgagcaatataagacgcaattgtgtttttcagtaatgtgcattgttattgagttgtactgtaccttatttggaaggatgaaggaatgaacctttttttcctaaaaaaaaaaaaaaaaaaaaaaaaaaaaaaaaa

SEQ ID NO: 730 - DNA, 368 bp, Homo sapiens; identical to SEQ ID NO: 91

SEQ ID NO: 731 - DNA, 3516 bp, Homo sapiens
tcgagggtgcgatggcgcggacgcgggaccgcgtacgcctgctgcttctcctgatctgctttaacgttggaagtggacttcacttacaggtcttaagcacaagaaatgaaaataagctgcttcctaaacatcctcatttagtgcggcaaaagcgcgcctggatcaccgcccccgtggctcttcgggagggagaggatctgtccaagaagaatccaattgccaagatacattctgatcttgcagaagaaagaggactcaaaattacttacaaatacactggaaaagggattacagagccaccttttggtatatttgtctttaacaaagatactggagaactgaatgttaccagcattcttgatcgagaagaaacaccattttttctgctaacaggttacgctttggatgcaagaggaaacaatgtagagaaacccttagagctacgcattaaggttcttgatatcaatgacaacgaaccagtgttcacacaggatgtctttgttgggtctgttgaagagttgagtgcagcacatactcttgtgatgaaaatcaatgcaacagatgcagatgagcccaataccctgaattcgaaaatttcctatagaatcgtatctctggagcctgcttatcctccagtgttctacctaaataaagatacaggagagatttatacaaccagtgttaccttggacagagaggaacacagcagctacactttgacagtagaagcaagagatggcaatggagaagttacagacaaacctgtaaaacaagctcaagttcagattcgtattttggatgtcaatgacaatatacctgtagtagaaaataaagtgcttgaagggatggttgaagaaaatcaagtcaatgtagaagttacgcgcataaaagtgttcgatgcagatgaaataggttctgataattggctggcaaattttacatttgcatcaggaaatgaaggaggttatttccacatagaaacagatgctcaaactaacgaaggaattgtgacccttattaaggaagtagattatgaagaaatgaagaatcttgacttcagtgttattgtcgctaataaagcagcttttcacaagtcgattaggagtaaatacaagcctacacccattcccatcaaggtcaaagtgaaaaatgtgaaagaaggcattcattttaaaagcagcgtcatctcaatttatgttagcgagagcatggatagatcaagcaaaggccaaataattggaaattttcaagcttttgatgaggacactggactaccagcccatgcaagatatgtaaaattagaagatagagataattggatctctgtggattctgtcacatctgaaattaaacttgcaaaacttcctgattttgaatctagatatgttcaaaatggcacatacactgtaaagattgtggccatatcagaagattatcctagaaaaaccatcactggcacagtccttatcaatgttgaagacatcaacgacaactgtcccacactgatagagcctgtgcagacaatctgtcacgatgcagagtatgtgaatgttactgcagaggacctggatggacacccaaacagtggccctttcagtttctccgtcattgacaaaccacctggcatggcagaaaaatggaaaatagcacgccaagaaagtaccagtgtgctgctgcaacaaagtgagaaaaagcttgggagaagtgaaattcagttcctgatttcagacaatcagggttttagttgtcctgaaaagcaggtccttacactcacagtttgtgaggttctgcatggcagcggctgcagggaagcacagcatgactcctatgtgggcctgggacccgcagcaattgcgctcatgattttggcctttctgctcctgctattggtaccacttttactgctgatgtgccattgcggaaagggcgccaaagcgtttacccccatacctggcaccatagagatgctgcatccttggaataatgaaggagcaccacctgaagacaaggtggtgccatcatttctgccagtggatcaagggggcagtctagtaggaagaaatggagtaggaggtatggccaaggaagccacgatgaaaggaagtagctctgcttccattgtcaaagggcaacatgagatgtccgagatggatggaaggtgggaagaacacagaagcctgctttctggtagagctacccagtttacaggggccacaggcgctatcatgaccactgaaaccacgaagaccgcaagggccacaggggcttccagagacatggccggagctcaggcagctgctgttgcactgaacgaagaattcttaagaaattatttcactgataaagcggcctcttacactgaggaagatgaaaatcacacagccaaagattgccttctggtttattctcaggaagaaactgaatcgctgaatgcttctattggttgttgcagttttattgaaggagagctagatgaccgcttcttagatgatttgggacttaaattcaagacgctagctgaagtttgcctgggtcaaaaaatagatataaataaggaaattgagcagagacaaaaacctgccacagaaacaagtatgaacacagcttcacattcactctgtgagcaaactatggttaattcagagaatacctactcctctggcagtagcttcccagttccaaaatctttgcaagaagccaatgcagagaaagtaactcaggaaatagtcactgaaagatctgtgtcttctaggcaggcgcaaaaggtagctacacctcttcctgacccaatggcttctagaaatgtgatagcaacagaaacttcctatgtcacagggtccactatgccaccaaccactgtgatcctgggtcctagccagccacagagccttattgtgacagagagggtgtatgctccagcttctaccttggtagatcagccttatgctaatgaaggtacagttgtggtcactgaaagagtaatacagcctcatgggggtggatcgaatcctctggaaggcactcagcatcttcaagatgtaccttacgtcatggtgagggaaagagagagcttccttgcccccagctcaggtgtgcagcctactctggccatgcctaatatagcagtaggacagaatgtgacagtgacagaaagagttctagcacctgcttccactctgcaatccagttaccagattcccactgaaaattctatgacggctaggaacaccacggtgtctggagctggagtccctggccctctgccagattttggtttagaggaatctggtcattctaattctaccataaccacatcttccaccagagtcaccaagcatagcactgtacagcattcttactcctaaacagcagtcagccacaaactgacccagagtttaattagcagtgactaatttcatgtttccaatgtacctgatttttcatgagccttacagacacacagagacacatacacattgatcttaaaatttttctcagtcactgatatgcaaagga

SEQ ID NO: 732 - DNA, 1306 bp, Homo sapiens
ggagacagcccgccggccgcccggatctccacctgccaccccagagctgggacagagccgggctgcggcactgggagggagaccccacagtggcctcttctgccacccacgcccccacccctggcatggccgaccagctgactgaggagcaggtcacagaattcaaggaggccttctccctgtttgacaaggatggggacggctgcatcaccacccgcgagctgggcacggtcatgcggtccctgggccagaaccccacggaggccgagctgcgggacatgatgagtgagatcgaccgggacggcaacggcaccgtggacttccccgagttcctgggcatgatggccaggaagatgaaggacacggacaacgaggaggagatccgcgaggccttccgcgtgttcgacaaggacggcaacggcttcgtcagcgccgccgagctacgacacgtcatgacccggctgggggagaagctgagtgacgaggaggtggacgagatgatccgggccgcggacacggacggagacggacaggtgaactacgaggagtttgtccgtgtgctggtgtccaagtgaggccggcgcccaccatgctcctgggcgcccacgcggcccacagggcaagaacccggggcctcccgcctcctcccccatccccctgcctcccctgggcactgtggcttcctcctgcgcctggttgattcagcccacctctctgcatcccgcttcccgcgtctcttctctgcactcctgccgaccttcccacctgctcatctgaatgacacggaacgctcccactgcaggcaaaccgtgacgccctccccactcgggagaagcagagctgaccttaggaccgagcaccagggcaggttgcgctgactctgcggccctccaggacggacaccgggtgaccccttaggcaccaggcaagatccctaagaggcacccaatgcccaggccagggggctgcagccctcagcccccgccaggattccgcaggctcctggactggaagctccctccgcggtcggattctggagtgtgggaggcatcttggcctgcagtaagcggtgctgacggggactctggccacagaggtcaggcctcctgaaaacagcactgccttccgcgctgccccagcttgccccattccttgtccgccaacccaccgtgattcatcttctgaagctgggagtgaaactgggtcagctgtaacctgttcctattcatctggaaggagggaggcttggatgagcaggggatgagagctgcagggaaataaatgagatattcgtccttaaaaaaaa

SEQ ID NO: 733 - DNA, 4858 bp, Homo sapiens
agactccggcccctgtcggccgccaagcccctccgcccctcacagcgcccaggtccgcggccgggccttgattttttggcggggaccgtcatggcgtcgcagccaaattcgtctgcgaagaagaaagaggagaaggggaagaacatccaggtggtggtgagatgcagaccatttaatttggcagagcggaaagctagcgcccattcaatagtagaatgtgatcctgtacgaaaagaagttagtgtacgaactggaggattggctgacaagagctcaaggaaaacatacacttttgatatggtgtttggagcatctactaaacagattgatgtttaccgaagtgttgtttgtccaattctggatgaagttattatgggctataattgcactatctttgcgtatggccaaactggcactggaaaaacttttacaatggaaggtgaaaggtcacctaatgaagagtatacctgggaagaggatcccttggctggtataattccacgtacccttcatcaaatttttgagaaacttactgataatggtactgaattttcagtcaaagtgtctctgttggagatctataatgaagagctttttgatcttcttaatccatcatctgatgtttctgagagactacagatgtttgatgatccccgtaacaagagaggagtgataattaaaggtttagaagaaattacagtacacaacaaggatgaagtctatcaaattttagaaaagggggcagcaaaaaggacaactgcagctactctgatgaatgcatactctagtcgttcccactcagttttctctgttacaatacatatgaaagaaactacgattgatggagaagagcttgttaaaatcggaaagttgaacttggttgatcttgcaggaagtgaaaacattggccgttctggagctgttgataagagagctcgggaagctggaaatataaatcaatccctgttgactttgggaagggtcattactgcccttgtagaaagaacacctcatgttccttatcgagaatctaaactaactagaatcctccaggattctcttggagggcgtacaagaacatctataattgcaacaatttctcctgcatctctcaatcttgaggaaactctgagtacattggaatatgctcatagagcaaagaacatattgaataagcctgaagtgaatcagaaactcaccaaaaaagctcttattaaggagtatacggaggagatagaacgtttaaaacgagatcttgctgcagcccgtgagaaaaatggagtgtatatttctgaagaaaattttagagtcatgagtggaaaattaactgttcaagaagagcagattgtagaattgattgaaaaaattggtgctgttgaggaggagctgaatagggttacagagttgtttatggataataaaaatgaacttgaccagtgtaaatctgacctgcaaaataaaacacaagaacttgaaaccactcaaaaacatttgcaagaaactaaattacaacttgttaaagaagaatatatcacatcagctttggaaagtactgaggagaaacttcatgatgctgccagcaagctgcttaacacagttgaagaaactacaaaagatgtatctggtctccattccaaactggatcgtaagaaggcagttgaccaacacaatgcagaagctcaggatatttttggcaaaaacctgaatagtctgtttaataatatggaagaattaattaaggatggcagctcaaagcaaaaggccatgctagaagtacataagaccttatttggtaatctgctgtcttccagtgtctctgcattagataccattactacagtagcacttggatctctcacatctattccagaaaatgtgtctactcatgtttctcagatttttaatatgatactaaaagaacaatcattagcagcagaaagtaaaactgtactacaggaattgattaatgtactcaagactgatcttctaagttcactggaaatgattttatccccaactgtggtgtctatactgaaaatcaatagtcaactaaagcatattttcaagacttcattgacagtggccgataagatagaagatcaaaaaaaggaactagatggctttctcagtatactgtgtaacaatctacatgaactacaagaaaataccatttgttccttggttgagtcacaaaagcaatgtggaaacctaactgaagacctgaagacaataaagcagacccattcccaggaactttgcaagttaatgaatctttggacagagagattctgtgctttggaggaaaagtgtgaaaatatacagaaaccacttagtagtgtccaggaaaatatacagcagaaatctaaggatatagtcaacaaaatgacttttcacagtcaaaaattttgtgctgattctgatggcttctcacaggaactcagaaattttaaccaagaaggtacaaaattggttgaagaatctgtgaaacactctgataaactcaatggcaacctggaaaaaatatctcaagagactgaacagagatgtgaatctctgaacacaagaacagtttatttttctgaacagtgggtatcttccttaaatgaaagggaacaggaacttcacaacttattggaggttgtaagccaatgttgtgaggcttcaagttcagacatcactgagaaatcagatggacgtaaggcagctcatgagaaacagcataacatttttcttgatcagatgactattgatgaagataaattgatagcacaaaatctagaacttaatgaaaccataaaaattggtttgactaagcttaattgctttctggaacaggatctgaaactggatatcccaacaggtacgacaccacagaggaaaagttatttatacccatcaacactggtaagaactgaaccacgtgaacatctccttgatcagctgaaaaggaaacagcctgagctgttaatgatgctaaactgttcagaaaacaacaaagaagagacaattccggatgtggatgtagaagaggcagttctggggcagtatactgaagaacctctaagtcaagagccatctgtagatgctggtgtggattgttcatcaattggcggggttccatttttccagcataaaaaatcacatggaaaagacaaagaaaacagaggcattaacacactggagaggtctaaagtggaagaaactacagagcacttggttacaaagagcagattacctctgcgagcccagatcaacctttaattcacttgggggttggcaattttatttttaaagaaaacttaaaaataaaacctgaaaccccagaacttgagccttgtgtatagattttaaaagaatatatatatcagccgggcgcggtggctcatgcctgtaatcccagcactttgggaggctgaggcgggtggattgcttgagcccaggagtttgagaccagcctggccaacgtggcaaaacctcgtctctgttaaaaattagccgggcgtggtggcacactcctgtaatcccagctactggggaggctgaggcacgagaatcacttgaacccaggaagcggggttgcagtgagccaaaggtacaccactacactccagcctgggcaacagagcaagactcggtctcaaaaacaaaatttaaaaaagatataaggcagtactgtaaattcagttgaattttgatatctacccatttttctgtcatccctatagttcactttgtattaaattgggtttcatttgggatttgcaatgtaaatacgtatttctagttttcatataaagtagttcttttataacaaatgaaaagtatttttcttgtatattattaagtaatgaatatataagaactgtactcttctcagcttgagcttaacataggtaaatatcaccaacatctgtccttagaaaggaccatctcatgttttttttcttgctatgacttgtgtattttcttgcatcctccctagacttccctatttcgctttctcctcggctcactttctccctttttatttttcaccaaaccatttgtagagctacaaaacctatcctttcttattttcagtagtcagaattttatctagaaatcttttaacacctttttagtggttatttctaaaatcactgtcaacaataaatctaaccctagttgtatccctcctttaagtatttaaaacttgttgccccaaatgtgaaagcatttaattcctttaagaggcctaactcattcaccctgacagagttcacaaaaagcccactttagagtatacattgctattatgggagaccacccagacatctgactaatggctctgtgccacactccaagacctgtgccttttagagaagctcacaatgatttaaggactgtttgaaacttccaattatgtctataatttatattcttttgtttacatgatgaaactttttgttgttgcttgtttgtatataatacaatgtgtacatgtatctttttctcgattcaaatcttaacccttaggactctggtatttttgatctggcaaccatatttctggaagttgagatgtttcagcttgaagaaccaaaacagaaggaatatgtacaaagaataaattttctgctcacgatgagtttagtgtgtaaagtttagagacatctgactttgatagctaaattaaaccaaaccctattgaagaattgaatatatgctacttcaagaaactaaattgatctcgtagaattatcttaataaaataatggctataatttctctgcaaaatcagatgtcagcataagcgatggataatacctaataaactgccctcagtaaatccatggttaataaatgtggtttctacatt

SEQ ID NO: 734 - DNA, 1597 bp, Homo sapiens
aacaaactgcacccactgaactccgcagctagcatccaaatcagcccttgagatttgaggccttggagactcaggagttttgagagcaaaatgacaacacccagaaattcagtaaatgggactttcctggcagagccaatgaaaggccctattgctatgcaatctggtccaaaaccactcttcaggaggatgtcttcactggtgggccccacgcaaagcttcttcatgagggaatctaagactttgggggctgtccagattatgaatgggctcttccacattgccctggggggtcttctgatgatcccagcagggatctatgcacccatctgtgtgactgtgtggtaccctctctggggaggcattatgtatattatttccggatcactcctggcagcaacggagaaaaactccaggaagtgtttggtcaaaggaaaaatgataatgaattcattgagcctctttgctgccatttctggaatgattctttcaatcatggacatacttaatattaaaatttcccattttttaaaaatggagagtctgaattttattagagctcacacaccatatattaacatatacaactgtgaaccagctaatccctctgagaaaaactccccatctacccaatactgttacagcatacaatctctgttcttgggcattttgtcagtgatgctgatctttgccttcttccaggaacttgtaatagctggcatcgttgagaatgaatggaaaagaacgtgctccagacccaaatctaacatagttctcctgtcagcagaagaaaaaaaagaacagactattgaaataaaagaagaagtggttgggctaactgaaacatcttcccaaccaaagaatgaagaagacattgaaattattccaatccaagaagaggaagaagaagaaacagagacgaactttccagaacctccccaagatcaggaatcctcaccaatagaaaatgacagctctccttaagtgatttcttctgttttctgtttccttttttaaacattagtgttcatagcttccaagagacatgctgactttcatttcttgaggtactctgcacatacgcaccacatctctatctggcctttgcatggagtgaccatagctccttctctcttacattgaatgtagagaatgtagccattgtagcagcttgtgttgtcacgcttcttcttttgagcaactttcttacactgaagaaaggcagaatgagtgcttcagaatgtgatttcctactaacctgttccttggataggctttttagtatagtatttttttttgtcattttctccatcagcaaccagggagactgcacctgatggaaaagatatatgactgcttcatgacattcctaaactatcttttttttattccacatctacgtttttggtggagtcccttttgcatcattgttttaaggatgataaaaaaaaaataacaactagggacaatacagaacccattccatttatctttctacagggctgacattgtggcacattcttagagttaccacaccccatgagggaagctctaaatagccaacacccatctgttttttgtaaaaacagcatagctt

SEQ ID NO: 735 - DNA, 2977 bp, Homo sapiens
tagcaagtttggcggctccaagccaggcgcgcctcaggatccaggctcatttgcttccacctagcttcggtgccccctgctaggcggggaccctcgagagcgatgccgatggatttgattttagttgtgtggttctgtgtgtgcactgccaggacagtggtgggctttgggatggaccctgaccttcagatggatatcgtcaccgagcttgaccttgtgaacaccacccttggagttgctcaggtgtctggaatgcacaatgccagcaaagcatttttatttcaagacatagaaagagagatccatgcagctcctcatgtgagtgagaaattaattcagctgttccagaacaagagtgaattcaccattttggccactgtacagcagaagccatccacttcaggagtgatactgtccattcgagaactggagcacagctattttgaactggagagcagtggcctgagggatgagattcggtatcactacatacacaatgggaagccaaggacagaggcacttccttaccgcatggcagatggacaatggcacaaggttgcactgtcagttagcgcctctcatctcctgctccatgtcgactgtaacaggatttatgagcgtgtgatagaccctccagataccaaccttcccccaggaatcaatttatggcttggccagcgcaaccaaaagcatggcttattcaaagggatcatccaagatgggaagatcatctttatgccgaatggatatataacacagtgtccaaatctaaatcacacttgcccaacctgcagtgatttcttaagcctggtgcaaggaataatggatttacaagagcttttggccaagatgactgcaaaactaaattatgcagagacaagacttagtcaattggaaaactgtcattgtgagaagacttgtcaagtgagtggactgctctatcgagatcaagactcttgggtagatggtgaccattgcaggaactgcacttgcaaaagtggtgccgtggaatgccgaaggatgtcctgtccccctctcaattgctccccagactccctcccagtacacattgctggccagtgctgtaaggtctgccgaccaaaatgtatctatggaggaaaagttcttgcagaaggccagcggattttaaccaagagctgtcgggaatgccgaggtggagttttagtaaaaattacagaaatgtgtcctcctttgaactgctcagaaaaggatcacattcttcctgagaatcagtgctgccgtgtctgtagaggtcataacttttgtgcagaaggacctaaatgtggtgaaaactcagagtgcaaaaactggaatacaaaagctacttgtgagtgcaagagtggttacatctctgtccagggagactctgcctactgtgaagatattgatgagtgtgcagctaagatgcattactgtcatgccaatactgtgtgtgtcaaccttcctgggttatatcgctgtgactgtgtcccaggatacattcgtgtggatgacttctcttgtacagaacacgatgaatgtggcagcggccagcacaactgtgatgagaatgccatctgcaccaacactgtccagggacacagctgcacctgcaaaccgggctacgtggggaacgggaccatctgcagagctttctgtgaagagggctgcagatacggtggaacgtgtgtggctcccaacaaatgtgtctgtccatctggattcacaggaagccactgcgagaaagatattgatgaatgttcagagggaatcattgagtgccacaaccattcccgctgcgttaacctgccagggtggtaccactgtgagtgcagaagcggtttccatgacgatgggacctattcactgtccggggagtcctgtattgacattgatgaatgtgccttaagaactcacacctgttggaacgattctgcctgcatcaacctggcagggggttttgactgtctctgcccctctgggccctcctgctctggtgactgtcctcatgaaggggggctgaagcacaatggccaggtgtggaccttgaaagaagacaggtgttctgtctgctcctgcaaggatggcaagatattctgccgacggacagcttgtgattgccagaatccaagtgctgacctattctgttgcccagaatgtgacaccagagtcacaagtcaatgtttagaccaaaatggtcacaagctgtatcgaagtggagacaattggacccatagctgtcagcagtgtcggtgtctggaaggagaggtagattgctggccactcacttgccccaacttgagctgtgagtatacagctatcttagaaggggaatgttgtccccgctgtgtcagtgacccctgcctagctgataacatcacctatgacatcagaaaaacttgcctggacagctatggtgtttcacggcttagtggctcagtgtggacgatggctggatctccctgcacaacctgtaaatgcaagaatggaagagtctgttgttctgtggattttgagtgtcttcaaaataattgaagtatttacagtggactcaacgcagaagaatggacgaaatgaccatccaacgtgattaaggataggaatcggtagtttggtttttttgtttgttttgtttttttaaccacagataattgccaaagtttccacctgaggacggtgtttcggaggttgccttttggacctaccactttgctcattcttgctaacctagtctaggtgacctacagtgccgtgcatttaagtcaatggttgttaaaagaagtttcccgtgttgtaaatcatgtttcccttatcagatcatttgcaaatacatttaaatgatctcatggtaaatggttgatgtattttttgggtttattttgtgtactaaccataatagagagagactcagctccttttatttattttgttgatttatggatcaaattctaaaataaagttgcctgttgtgactttt

SEQ ID NO: 736 - DNA, 1025 bp, Homo sapiens
gtcccgagcgcgagcggagacgatgcagcggagactggttcagcagtggagcgtcgcggtgttcctgctgagctacgcggtgccctcctgcgggcgctcggtggagggtctcagccgccgcctcaaaagagctgtgtctgaacatcagctcctccatgacaaggggaagtccatccaagatttacggcgacgattcttccttcaccatctgatcgcagaaatccacacagctgaaatcagagctacctcggaggtgtcccctaactccaagccctctcccaacacaaagaaccaccccgtccgatttgggtctgatgatgagggcagatacctaactcaggaaactaacaaggtggagacgtacaaagagcagccgctcaagacacctgggaagaaaaagaaaggcaagcccgggaaacgcaaggagcaggaaaagaaaaaacggcgaactcgctctgcctggttagactctggagtgactgggagtgggctagaaggggaccacctgtctgacacctccacaacgtcgctggagctcgattcacggaggcattgaaattttcagcagagaccttccaaggacatattgcaggattctgtaatagtgaacatatggaaagtattagaaatatttattgtctgtaaatactgtaaatgcattggaataaaactgtctcccccattgctctatgaaactgcacattggtcattgtgaatatttttttttttgccaaggctaatccaattattattatcacatttaccataatttattttgtccattgatgtatttattttgtaaatgtatcttggtgctgctgaatttctatattttttgtaacataatgcactttagatatacatatcaagtatgttgataaatgacacaatgaagtgtctctattttgtggttgattttaatgaatgcctaaatataattatccaaattgattttccttcgtgcatgtaaaaataacagtattttaaatttgtaaagaatgtctaataaaatataatctaattac

SEQ ID NO: 737 - DNA, 2110 bp, Homo sapiens
gtgaagtgctcagaatggggcaggatgtcacctggaatcagcactaagtgattcagactttccttacttttaaatgtgctgctcttcatttcaagatgccgttgcagctctgataaatgcaaactgacaaccttcaaggccacgacggagggaaaatcattggtgcttggagcatagaagactgcccttcacaaaggaaatccctgattattgtttgaaatgctgaggacgttgctgcgaaggagacttttttcttatcccaccaaatactactttatggttcttgttttatccctaatcaccttctccgttttaaggattcatcaaaagcctgaatttgtaagtgtcagacacttggagcttgctggggagaatcctagtagtgatattaattgcaccaaagttttacagggtgatgtaaatgaaatccaaaaggtaaagcttgagatcctaacagtgaaatttaaaaagcgccctcggtggacacctgacgactatataaacatgaccagtgactgttcttctttcatcaagagacgcaaatatattgtagaaccccttagtaaagaagaggcggagtttccaatagcatattctatagtggttcatcacaagattgaaatgcttgacaggctgctgagggccatctatatgcctcagaatttctattgcgttcatgtggacacaaaatccgaggattcctatttagctgcagtgatgggcatcgcttcctgttttagtaatgtctttgtggccagccgattggagagtgtggtttatgcatcgtggagccgggttcaggctgacctcaactgcatgaaggatctctatgcaatgagtgcaaactggaagtacttgataaatctttgtggtatggattttcccattaaaaccaacctagaaattgtcaggaagctcaagttgttaatgggagaaaacaacctggaaacggagaggatgccatcccataaagaagaaaggtggaagaagcggtatgaggtcgttaatggaaagctgacaaacacagggactgtcaaaatgcttcctccactcgaaacacctctcttttctggcagtgcctacttcgtggtcagtagggagtatgtggggtatgtactacagaatgaaaaaatccaaaagttgatggagtgggcacaagacacatacagccctgatgagtatctctgggccaccatccaaaggattcctgaagtcccgggctcactccctgccagccataagtatgatctatctgacatgcaagcagttgccaggtttgtcaagtggcagtactttgagggtgatgtttccaagggtgctccctacccgccctgcgatggagtccatgtgcgctcagtgtgcattttcggagctggtgacttgaactggatgctgcgcaaacaccacttgtttgccaataagtttgacgtggatgttgacctctttgccatccagtgtttggatgagcatttgagacacaaagctttggagacattaaaacactgaccattacgggcaattttatgaacaagaagaaggatacacaaaacgtaccttatctgtttccccttccttgtcagcgtcgggaagatggtatgaagtcctctttggggcagggactctagtagatcttcttgtcagagaagctgcatggtttctgcagagcacagttagctagaaaggtgatagcattaaatgttcatctagagttaatagtgggaggagtaaaggtagccttgaggccagagcaggtagcaaggcattgtggaaagaggggaccagggtggctggggaagaggccgatgcataaagtcagcctgttccaagtgctcagggacttagcaaaatgagaagatgtgacctgtgccaaaactattttgagaattttaaatgtgaccatttttctggtatgccaataaaddcttacagcaacaaataatcaaagatacaattaatctgatattatatttgttgaaatagaaatttgattgtactataaatgatttttgtaaataatttatattctgctctaatactgtactgtgtagtgtgtctccgtatgtcatctcagggagcttaaaatgggcttgatttaacattgaaaaaaaat

SEQ ID NO: 738 - DNA, 4067 bp, Homo sapiens
cttgaatcttggggcaggaactcagaaaacttccagcccgggcagcgcgcgcttggtgcaagactcaggagctagcagcccgtccccctccgactctccggtgccgccgctgcctgctcccgccaccctaggaggcgcggtgccacccactactctgtcctctgcctgtgctccgtgcccgaccctatcccggcggagtctccccatcctcctttgctttccgactgcccaaggcactttcaatctcaatctcttctctctctctctctctctctctgtctctctctctctctctctctctctctctctcgcagggtggggggaagaggaggaggaattctttccccgcctaacatttcaagggacacaattcactccaagtctcttccctttccaagccgcttccgaagtgctcccggtgcccgcaactcctgatcccaacccgcgagaggagcctctgcgacctcaaagcctctcttccttctccctcgcttccctcctcctcttgctacctccacctccaccgccacctccacctccggcacccacccaccgccgccgccgccaccggcagcgcctcctcctctcctcctcctcctcccctcttctctttttggcagccgctggacgtccggtgttgatggtggcagcggcggcagcctaagcaacagcagccctcgcagcccgccagctcgcgctcgccccgccggcgtccccagccctatcacctcatctcccgaaaggtgctgggcagctccggggcggtcgaggcgaagcggctgcagcggcggtagcggcggcgggaggcaggatgagcgcacgcggtgagggcgcggggcagccgtccacttcagcccagggacaacctgccgccccagcgcctcagaagagaggacgcggccgccccaggaagcagcagcaagaaccaaccggtgagccctctcctaagagacccaggggaagacccaaaggcagcaaaaacaagagtccctctaaagcagctcaaaagaaagcagaagccactggagaaaaacggccaagaggcagacctaggaaatggccacaacaagttgttcagaagaagcctgctcaggaggaaactgaagagacatcctcacaagagtctgccgaagaggactagggggcgcaacgttcgatttctacctcagcagcagttggatcttttgaagggagaagacactgcagtgaccacttattctgtattgccatggtctttccactttcatctggggtggggtggggtggggtgggggaggggggggtggggtggggagaaatcacataaccttaaaaaggactatattaatcaccttctttgtaatcccttcacagtcccaggtttagtgaaaaactgctgtaaacacaggggacacagcttaacaatgcaacttttaattactgttttcttttttcttaacctactaatagtttgttgatctgataagcaagagtgggcgggtgagaaaaaccgaattgggtttagtcaatcactgcactgcatgcaaacaagaaacgtgtcacacttgtgacgtcgggcattcatataggaagaacgcggtgtgtaacactgtgtacacctcaaataccaccccaacccactccctgtagtgaatcctctgtttagaacaccaaagataaggactagatactactttctctttttcgtataatcttgtagacacttacttgatgatttttaactttttatttctaaatgagacgaaatgctgatgtatcctttcattcagctaacaaactagaaaaggttatgttcatttttcaaaaagggaagtaagcaaacaaatattgccaactcttctatttatggatatcacacatatcagcaggagtaataaatttactcacagcacttgttttcaggacaacacttcattttcaggaaatctacttcctacagagccaaaatgccatttagcaataaataacacttgtcagcctcagagcatttaaggaaactagacaagtaaaattatcctctttgtaatttaatgaaaaggtacaacagaataatgcatgatgaactcacctaattatgaggtgggaggagcgaaatctaaatttcttttgctatagttatacatcaatttaaaaagcaaaaaaaaaaaggggggggcaatctctctctgtgtctttctctctctctctccctctccctctctcttttcatgtgtatcagtttccatgaaagacctgaataccacttacctcaaattaagcatatgtgttacttcaagtaatacgttttgacataagatggttgaccaaggtgcttttcttcggcttgagttcaccatctcttcattcaaactgcacttttagccagagatgcaatatatccccactactcaatactacctctgaatgttacaacgaatttacagtctagtacttattacatgctgctatacacaagcaatgcaagaaaaaaacttactgggtaggtgattctaatcatctgcagttctttttgtacacttaattacagttaaagaagcaatctccttactgtgtttcagcatgactatgtatttttctatgtttttttaattaaaaatttttaaaatacttgtttcagcttctctgctagatttctacattaacttgaaaattttttaaccaagtcgctcctaggttcttaaggataattttcctcaatcacactacacatcacacaagatttgactgtaatatttaaatattaccctccaagtctgtacctcaaatgaattctttaaggagatggactaattgacttgcaaagacctacctccagacttcaaaaggaatgaacttgttacttgcagcattcatttgttttttcaatgtttgaaatagttcaaactgcagctaaccctagtcaaaactatttttgtaaaagacatttgatagaaaggaacacgtttttacatacttttgcaaaataagtaaataataaataaaataaagccaaccttcaaagaacttgaagctttgtaggtgagatgcaacaagccctgcttttgcataatgcaatcaaaaatatgtgtttttaagattagttgaatataagaaaatgcttgacaaatattttcatgtattttacacaaatgtgatttttgtaatatgtctcaaccagatttattttaaacgcttcttatgtagagtttttatgcctttctctcctagtgagtgtgctgactttttaacatggtattatcaactgggccaggaggtagtttctcatgacggcttttgtcagtatggcttttagtactgaagccaaatgaaactcaaaaccatctctcttccagctgcttcagggaggtagtttcaaaggccacatacctctctgagactggcagatcgctcactgttgtgaatcaccaaaggagctatggagagaattaaaactcaacattactgttaactgtgcgttaaataagcaaataaacagtggctcataaaaataaaagtcgcattccatatctttggatgggccttttagaaacctcattggccagctcataaaatggaagcaattgctcatgttggccaaacatggtgcaccgagtgatttccatctctggtaaagttacacttttatttcctgtatgttgtacaatcaaaacacactactacctcttaagtcccagtatacctcatttttcatactgaaaaaaaaagcttgtggccaatggaacagtaagaacatcataaaatttttatatatatagtttatttttgtgggagataaattttataggactgttctttgctgttgttggtcgcagctacataagactggacatttaacttttctaccatttctgcaagttaggtatgtttgcaggagaaaagtatcaagacgtttaactgcagttgactttctccctgttcctttgagtgtcttctaactttattctttgttctttatgtagaattgctgtctatgattgtactttgaatcgcttgcttgttgaaaatatttctctagtgtattatcactgtctgttctgcacaataaacataacagcctctgtgatccc

SEQ ID NO: 739 - DNA, 995 bp, Homo sapiens
taaaatgtgaggcgattattttaagtaattatcttaccaagcccaagactggttttaaagttacctgaagctcttaacttcctcccctctgaatttagtttggggaaggtgtttttagtacaagacatcaaagtgaagtaaagcccaagtgttctttagctttttataatactgtctaaatagtgaccatctcatgggcattgttttcttctctgctttgtctgtgttttgagtctgctttcttttgtctttaaaacctgatttttaagttcttctgaactgtagaaatagctatctgatcacttcagcgtaaagcagtgtgtttattaaccatccactaagctaaaactagagcagtttgatttaaaagtgtcactcttcctccttttctactttcagtagatatgagatagagcataattatctgttttatcttagttttatacataatttaccatcagatagaactttatggttctagtacagatactctactacactcagcctcttatgtgccaagtttttctttaagcaatgagaaattgctcatgttcttcatcttctcaaatcatcagaggccaaagaaaaacactttggctgtgtctataacttgacacagtcaatagaatgaagaaaattagagtagttatgtgattatttcagctcttgacctgtcccctctggctgcctctgagtctgaatctcccaaagagagaaaccaatttctaagaggactggattgcagaagactcggggacaacatttgatccaagatcttaaatgttatattgataaccatgctcagcaatgagctattagattcattttgggaaatctccataatttcaatttgtaaactttgttaagacctgtctacattgttatatgtgtgtgacttgagtaatgttatcaacgtttttgtaaatatttactatgtttttctattagctaaattccaacaattttgtactttaataaaatgttctaaacattgc

SEQ ID NO: 740 - DNA, 1098 bp, Homo sapiens
aattctcctgtgtgagctaaaatacagtggctcggtccaacaaaacagagcctggagccaggaattatggcgaacctgctccctccgtcctccttcggcgaagatccctggcgcgcgtccttgaggtcgccttcggtgttgacctcatcgtcggaacggcgcttcctgaagctttatataagcacggctctgaatccgctcgtcggattaaatcctgcgctggcgtcctgccagtctctcgctccatttgctcttcctgaggctccctccagagacctttcccttagcctcagtgcgaatgcttccgggcgtcctcagaaccagagcacagccaaagccactacagaatccggaagcccggttgggatctgaattctcccggggaccgttgcgtaggcgttaaaaaaaaaaaagagtgagagggacctgagcagagtggaggaggagggagaggaaaacagaaaagaaatgacgaaatgtcgagagggcggggacaattgagaacgcttcccgccggcgcgctttcggttttcaatctggtccgatactcttgtatatcaggggaagacggtgctcgccttgacagaagctgtctatcgggctccagcggtcatgtccggcagaggaaagggcggaaaaggcttaggcaaagggggcgctaagcgccaccgcaaggtcttgagagacaacattcagggcatcaccaagcctgccattcggcgtctagctcggcgtggcggcgttaagcggatctctggcctcatttacgaggagacccgcggtgtgctgaaagtgttcttggagaatgtgattcgggacgcagtcacctacaccgagcacgccaagcgcaagaccgtcacagccatggatgtggtgtacgcgctcaagcgccaggggagaaccctctacggcttcggaggctaggcgccgctccagctttgcacgtttcgatcccaaaggccctttttgggccgaccacttgctcatcctgaggagttggacacttgactgcgtaaagtgcaacagtaacgatgttggaaggtaactttggcagtggggcgacaatcggatctgaagttaacggaaagacataaccgc

SEQ ID NO: 741 - DNA, 3127 bp, Homo sapiens; identical to SEQ ID NO: 74

SEQ ID NO: 742 - DNA, 3835 bp, Homo sapiens
catgcgtgactgcccccacactcacacagctctcactccccacatgctccatgcctcctgtccccactgaggagagctcctagaggctcgcccgctccccactgacatgcatccctgcagacaaacgaggcgcccagagagcttccccactgcacttgccagggctgcgggcccagccttgcccctagcttcctctggcgggagctatggctcggaggagaatggggacttctgaacatacctgcccgcaagggggaccggaggtgctcggagtgggcttgtgagggaggtggtgccgcagtccccgctgagcagcctggccccccagatcgtgtacttcactgctacattcccctacgtggtcgtggtcgtgctgcttgtgcttggagtgctgctgcctggcgccctggacagcatcatttactatctcaagcctgactggtcaaagctggggtcccctcaggtgaggtggaggtggggaggctgcagcagggtgttgtgggggagccctgcaggcccctcatgcctgcactctccagccctttctctgtaggtatggatagatgtggggacccagattttcttttcttatgccattggcctgggggccctcacagccctgggcagctacaaccgcttcaacaacaactgctacaagtaagcactgctgccctgccacccgtgccctgtcccgccctgccctgcccagcagcctaacccatccactctggcccctccacccctccaggacgccatcatcctggctgtcatcaacagtgggaccagcttctttgctggcttcgtggtcttctccatcctgggcttcatggctgcagagcagggcatgcacatctccaaggtggcagagtcaggtagggccctacccccagccccgcctccagagcagcaactgccacccagatgcatgatgtacaagaacacgcaatagaaatgctgaaaagtgatgaggattcaaacagaacttctcagattgtgggcctgtgggggcaggtcctgggatttttcaatgttgacagagacaggacctcccagcccctgctgcatgacccagggttgacagcacctcagaggcaggcgtgggcatgggcgtgagtgttgcaggcagggctcagggtgcgcgcagggcacgacatcggctgcaaggtctagagcctgcacctttcccacagggccgggcctggccttcatcgcctacccacaggctgtcacactgatgccagtggccccactctgggctgccctgttcttcttcatgctgttgctgcttggtctcgacaaccagtttgcatgggctctgggacagggagccaggagaggggcggagtgagggctgcgggcaaggaaaggggtggagggtggtgcggggctcggcctgagctagcctggccacagtttgtaggtgtggagggcttcatcaccggcctcctcaacctcctcccggcctcctactacttctgtttccaaagggagatctctgtggccctctgttgtgccctccgctttgtcattgatctctccatggtgactgatgtgagtggggtggggggtctgcctgtgacctctggtggccgtctgccatcctccctgactgggctctgtcccccagggtgggatgtatgtcttccagctgtttgactactactcggccagcggcaccaccctgctctggcaggccttttgggagtgcgtggtggtggtctgggtgtatggtaggtcatggctgagggctgggctggggcatggtgacggggaaggcaggtctccagcttggccctcccgcctcgccttgccacaggagctgaccgcttcacggacgacattgcctgtatgatcgggtaccgaccttgcccctggatgaaatggtgctggtccttcttcaccccgctggtttgcatggtaagggctgggggaggtggggcggggtggggggggcggggcggggtgggggccccattaaggacgggcattctggtctgtagggcatcttcatcttcaacgttgtgtactacaagccgctggtctacaacaacacctacgtgtacccgtggtggggtgaggccatgggctgggccttcgtgctgtcctccatgctgtgcatgccactgcacctcctgggctgcctcctcagggccaagggcaccatggctgaggtaaggctccctcccggcctgccctcccctcccctgctatgaacattcaacccagcctgcttcctagccaaggagtggccctgactagggtggcaggcagcaggagctggagagagaggcagaggaagtcaccgtggggatgagcaggtgactctgggggcttcaacatgtcctctcctgcagtgctggaagcacctgacccagcccatctggggcctccaccacttggagtaccgagctcaggatgcagatgtcaggggcctgaccaccctgaccccagtgtccgagagcagcaaggtcgtcgtggtggagagtgtcatgggacagctcagctcacatcaccagctcacctctggtagccatagcagcccctgcttcatccccaccccacccctccagggggcctgcctttccctgacacttttggggtctgcctgggagaggaggggagaaagcaccatgagtgctcactaaaacaactttttccatttttaataaaacgccaaaaatatcacaacccaccaaaaatagatgcctctccccctccagtcctagcccagctggtcctaggccccgcctagtgccccacccccacccacagtgctgcactcctcctgcccctgccacgcccaccccctgcccacctctccaggttctgctctgtagcacacccttgggtgacccctcaccccagaagcagcagtggcagcttgggaaatgtgaggaagggaaggagggagagacgggagggaggagagagaggagaagggaggcaggggaggggcagcagaaccaagacaaatatttcagctgggctatacccctctccccatccctgttatagaagcttagagagccagccagcagtggaaccttctggttcctgcgccaatcaccaccaatatcaattgtgtgagcttgggtgcgagtgcacgcgtgcgtgagcacgtagagtatatatagatctctatctcttagcaaaggtgaataccagatgtaaatggtgcctctgggcaaaggaggcttgtattttgcacattttataacaacttgagagaatgagatttctgcttgtatatttctaaaaagaggaaggagccccaaacccatcctctcctttaccactccccatttcctgtgagccctaccttacccctctgcccctagcctaggagtgtgaatttatagatctaactttcagaggcaaaacaaaagcttcgagctgttgatgtgcagtctgttgtgtggatgtgtgtgtgtggtcccccagacccagaatggattggaaaagtgcatggtggggcctcggggctgtccccacgctgtccctttgcccacaggtctgtggggcaacaggctgcaatattccatcctgggtgtctgggctgctaacctggcctgctcaggcttcccaccctgtgccctgggctgggcacacccccgggaagggaccccggacacggctcccacatccaggctcaaggcggatgcacttcctgcacctccagtcttctgtgtagcggctttaacccacgtatgtctgtcacgtccagtcccgagacggctgagtgaccccaagaaaggcttccctgacacccggacagaggctggagggctggggctgggtgagggtggtgggcctgcggggacattctactgtgcta

SEQ ID NO: 743 - DNA, 3153 bp, Homo sapiens
ccggggccacgcgattggcgcgaagttttcttttctccttccaccttcttttcatttctagtgagacacacgctttggtcctggctttcggcccgtagttgtagaaggagccctgctggtgcaggttagaggtgccgcatcccccggagctctcgaagtggaggcggtaggaaacggagggcttgcggctagccggaggaagctttggagccggaagccatggcacactaccccacaaggctgaagaccagaaaaacttattcatgggttggcaggcccttgttggatcgaaaactgcactaccaaacctatagagaaatgtgtgtgaaaacagaaggttgttccaccgagattcacatccagattggacagtttgtgttgattgaaggggatgatgatgaaaacccgtatgttgctaaattgcttgagttgttcgaagatgactctgatcctcctcctaagaaacgtgctcgagtacagtggtttgtccgattctgtgaagtccctgcctgtaaacggcatttgttgggccggaagcctggtgcacaggaaatattctggtatgattacccggcctgtgacagcaacattaatgcggagaccatcattggccttgttcgggtgatacctttagccccaaaggatgtggtaccgacgaatctgaaaaatgagaagacactctttgtgaaactatcctggaatgagaagaaattcaggccactttcctcagaactatttgcggagttgaataaaccacaagagagtgcagccaagtgccagaaacccgtgagagccaagagtaagagtgcagagagcccttcttggaccccagcagaacatgtggccaaaaggattgaatcaaggcactccgcctccaaatctcgccaaactcctacccatcctcttaccccaagagccagaaagaggctggagcttggcaacttaggtaaccctcagatgtcccagcagacttcatgtgcctccttggattctccaggaagaataaaacggaaagtggccttctcggagatcacctcaccttctaagagatctcagcctgataaacttcaaaccttgtctccagctctgaaagccccagagaaaaccagagagactggactctcttatactgaggatgacaagaaggcttcacctgaacatcgcataatcctgagaacccgaattgcagcttcgaaaaccatagacattagagaggagagaacacttacccctatcagtgggggacagagatcttcagtggtgccatccgtgattctgaaaccagaaaacatcaaaaagagggatgcaaaagaagcaaaagcccagaatgaagcgacctctactccccatcgtatccgcagaaagagttctgtcttgactatgaatcggattaggcagcagcttcggtttctaggtaatagtaaaagtgaccaagaagagaaagagattctgccagcagcagagatttcagactctagcagtgacgaagaagaggcttccacaccgccccttccaaggagagcacccagaactgtgtccaggaacctgcgatcttccttgaagtcatccttacataccctcacgaaggtgccaaagaagagtctcaagcctagaacgccacgttgtgccgctcctcagatccgtagtcgaagcctggctgcccaggagccagccagtgtgctggaggaagcccgactgaggctgcatgtttctgctgtacctgagtctcttccctgtcgggaacaggaattccaagacatctacaattttgtggaaagcaaactccttgaccataccggagggtgcatgtacatctccggtgtccctgggacagggaagactgccactgttcatgaagtgatacgctgcctgcagcaggcagcccaagccaatgatgttcctccctttcaatacattgaggtcaatggcatgaagctgacggagccccaccaagtctatgtgcacatcttgcagaagctaacaggccaaaaagcaacagccaaccatgcggcagaactgctggcaaagcaattctgcacccgagggtcacctcaggaaaccaccgtcctgcttgtggatgagctcgaccttctgtggactcacaaacaagacataatgtacaatctctttgactggcccactcataaggaggcccggcttgtggtcctggcaattgccaacacaatggacctgccagagcgaatcatgatgaaccgggtgtccagccgactgggtcttaccaggatgtgcttccagccctatacatatagccagctgcagcagatcctaaggtcccggctcaagcatctaaaggcctttgaagatgatgccatccagctggtagccaggaaggtagcagcactgtctggagatgcacgacggtgcctggacatctgcaggcgtgccacagagatctgtgagttctcccagcagaagcctgactcccctggcctggtcaccatagcccactcaatggaagctgtggatgagatgttttcatcatcatacatcacggccatcaaaaattcctctgttctggaacagagcttcctgagagccatcctcgcagagttccgtcgatcaggactggaggaagccacgtttcaacagatatatagtcaacatgtggcactgtgcagaatggagggactgccgtaccccaccatgtcagagaccatggccgtgtgttctcacctgggctcctgtcgcctcctgcttgtggagcccagcaggaacgatctgctccttcgggtgcggctcaacgtcagccaggatgatgtgctgtatgcgctgaaagacgagtaaaggggcttcacaagttaaaagactggggtcttgctgggttttgttttttgagacagggtcttgctctgtcgcccaggctggagtgcagtggcacgatcatggctcactgcagccttgacttctcaggcttaggtgaccccccaacctcatcctcccaggtggctgaaactacaggcacatgccaccatgcccagctgattttttgtagagacagggcttcaccatgttgccaagctagtctacaaagcatctgattttggaagtacatggaattgttgtaacaaagtatattgaatggaaatggctctcatgtattttggaattttccattaaataatttgcttttta

SEQ ID NO: 744 - DNA, 683 bp, Homo sapiens
aactcctggtactctagcaccgatctgctttggagaacctgatcctgagactccagcaggatgtcttatcaacagcagcagtgcaagcagccctgccagccacctcctgtgtgccccacgccaaattgcccagagccatgtccacccccgaagtcccctgagccctgcccaccatcaaagtgtccacagccctgcccacctcagcagtgccagcagaaatatcctcctgtgacaccttccccaccctgccagccaaagtgtccacccaagagcaagtaacagcttcaggattcatcaggaccatgagaggataaggataattggctcacctcgttccacacctccacttgcatcttctcaccaaagccttccatggatgcacagggagcttctttctccttaacctgtggcctgcctgtgatgatctgtgacagcaaaagattccctttctgaggctgccatactgccactgtccaggtggagctaagaaaaggaagtcctcagctgtgccagctcccagagcttcagcagaaagagcagcagctctctccctgggaaccatcagacaattctgttgatgtgttctgtgtctgtctgtcacctggtcatgagcttctaccacctttgcaattgtcatttatcgttcactccctgaataaagtatctatgcatatatatttgta

SEQ ID NO: 745 - DNA, 751 bp, Homo sapiens
cgggaggtgtagaaaaggatttagggtaggtttcgcataaatatccaatcaaaaagtagacttgaatttaacttttttattggctgatttggtccaatcagggattgagaatgattaagcacctatttgcataaaagacctacaaaaacggccagctgtgctgttgagccttcactttggggtgtattcttactcctttatcttgttgcaatgcctgatccagctaagtccgctcccgccccgaagaagggctccaagaaggcggtgaccaaggcgcagaagaaggatggcaagaagcgtaaacgcagccgcaaggagagctactccgtatacgtttacaaggtgctgaagcaagtccaccccgacaccggcatctcctccaaagccatggggatcatgaattcctttgtcaacgatatcttcgagcgcatcgccggcgaggcttcccgcctggctcattacaacaagcgttcgaccattacctccagggagatccagacagccgtgcgcctgctgctgcctggggaactggccaagcacgccgtgtccgagggcactaaggccgtcaccaagtacaccagctccaaataaatggacgcatgttcaaacccaaaggctcttttcagagccacttaatgatttcaattaagagttttaatgctgggtgctgctgtattctatgggagaagtgtcgccaatacaggtaaaattttcctacatcacctgtttattctgtgcgtttgacaaacac

SEQ ID NO: 746 - DNA, 701 bp, Homo sapiens
gttaaaatatgcctaaatttcctctttgggaacgcaagacttgcagagatgactccatggagagcggactctgccggcgggaactggagtcgttggtgacgtcatcccagtctgatctgtgaagggtagggccagcaggcagcaccaaagttcccgtatgcgcgttttcagtcttcatttaggtccgaattcccggcatataagaatactaccgtcgcttgtttttcagatttttgcggctattttcgttggtgtgttggtcatgtctggtcgcggcaaaggcggaaagggactgggtaaaggaggcgctaagcgtcaccgtaaggtcctgcgagataacatccagggcattaccaagcctgccatccggcgccttgctcgtcgcgggggtgtcaagcgcatttctggtctcatctacgaggagactcgcggggttctgaaggtgtttctggaaaacgtgattcgtgatgctgtgacttacacggagcacgccaaacgcaagacagtgacagcgatggatgtggtctacgcgctgaagagacagggacgcactctttacggcttcggcggctaatgctaccgcttaaacgactcagcatctcgacttcccaaatcaaaggcccttttcagggccgcccacagttttccgcaaaagagctcatgacttgttagacgattggttagtctctttataagttaat

SEQ ID NO: 747 - DNA, 4204 bp, Homo sapiens
acgcaggcagtgatgtcacccagaccacaccccttcccccaatgccacttcagggggtactcagagtcagagacttggtctgaggggagcagaagcaatctgcagaggatggcggtccaggctcagccaggcatcaacttcaggaccctgagggatgaccgaaggccccgcccacccacccccaactcccccgaccccaccaggatctacagcctcaggacccccgtcccaatccttaccccttgccccatcaccatcttcatgcttacctccacccccatccgatccccatccaggcagaatccagttccacccctgcccggaacccagggtagtaccgttgccaggatgtgacgccactgacttgcgcattggaggtcagaagaccgcgagattctcgccctgagcaacgagcgacggcctgacgtcggcggagggaagccggcccaggctcggtgaggaggcaaggtaagacgctgagggaggactgaggcgggcctcacctcagacagagggcctcaaataatccagtgctgcctctgctgccgggcctgggccaccccgcaggggaagacttccaggctgggtcgccactacctcaccccgccgacccccgccgctttagccacggggaactctggggacagagcttaatgtggccagggcagggctggttagaagaggtcagggcccacgctgtggcaggaatcaaggtcaggaccccgagagggaactgagggcagcctaaccaccaccctcaccaccattcccgtcccccaacacccaaccccacccccatcccccattcccatccccacccccacccctatcctggcagaatccgggctttgcccctggtatcaagtcacggaagctccgggaatggcggccaggcacgtgagtcctgaggttcacatctacggctaagggagggaaggggttcggtatcgcgagtatggccgttgggaggcagcgaaagggcccaggcctcctggaagacagtggagtcctgaggggacccagcatgccaggacagggggcccactgtacccctgtctcaaaccgaggcaccttttcattcggctacgggaatcctagggatgcagacccacttcagcagggggttggggcccagccctgcgaggagtcatggggaggaagaagagggaggactgaggggaccttggagtccagatcagtggcaaccttgggctgggggatgctgggcacagtggccaaatgtgctctgtgctcattgcgccttcagggtgaccagagagttgagggctgtggtctgaagagtgggacttcaggtcagcagagggaggaatcccaggatctgcagggcccaaggtgtacccccaaggggcccctatgtggtggacagatgcagtggtcctaggatctgccaagcatccaggtgaagagactgagggaggattgagggtacccctgggacagaatgcggactgggggccccataaaaatctgccctgctcctgctgttacctcagagagcctgggcagggctgtcagctgaggtccctccattatcctaggatcactgatgtcagggaaggggaagccttggtctgagggggctgcactcagggcagtagagggaggctctcagaccctactaggagtggaggtgaggaccaagcagtctcctcacccagggtacatggacttcaataaatttggacatctctcgttgtcctttccgggaggacctgggaatgtatggccagatgtgggtcccctcatgtttttctgtaccatatcaggtatgtgagttcttgacatgagagattctcaggccagcagaagggagggattaggccctataaggagaaaggtgagggccctgagtgagcacagaggggatcctccaccccagtagagtggggacctcacagagtctggccaaccctcctgacagttctgggaatccgtggctgcgtttgctgtctgcacattgggggcccgtggattcctctcccaggaatcaggagctccaggaacaaggcagtgaggacttggtctgaggcagtgtcctcaggtcacagagtagagggggctcagatagtgccaacggtgaaggtttgccttggattcaaaccaagggccccacctgccccagaacacatggactccagagcgcctggcctcaccctcaatactttcagtcctgcagcctcagcatgcgctggccggatgtaccctgaggtgccctctcacttcctccttcaggttctgaggggacaggctgacctggaggaccagaggcccccggaggagcactgaaggagaagatctgtaagtaagcctttgttagagcctccaaggttccattcagtactcagctgaggtctctcacatgctccctctctccccaggccagtgggtctccattgcccagctcctgcccacactcccgcctgttgccctgaccagagtcatcatgcctcttgagcagaggagtcagcactgcaagcctgaagaaggccttgaggcccgaggagaggccctgggcctggtgggtgcgcaggctcctgctactgaggagcaggaggctgcctcctcctcttctactctagttgaagtcaccctgggggaggtgcctgctgccgagtcaccagatcctccccagagtcctcagggagcctccagcctccccactaccatgaactaccctctctggagccaatcctatgaggactccagcaaccaagaagaggaggggccaagcaccttccctgacctggagtccgagttccaagcagcactcagtaggaaggtggccgagttggttcattttctgctcctcaagtatcgagccagggagccggtcacaaaggcagaaatgctggggagtgtcgtcggaaattggcagtatttctttcctgtgatcttcagcaaagcttccagttccttgcagctggtctttggcatcgagctgatggaagtggaccccatcggccacttgtacatctttgccacctgcctgggcctctcctacgatggcctgctgggtgacaatcagatcatgcccaaggcaggcctcctgataatcgtcctggccataatcgcaagagagggcgactgtgcccctgaggagaaaatctgggaggagctgagtgtgttagaggtgtttgaggggagggaagacagtatcttgggggatcccaagaagctgctcacccaacatttcgtgcaggaaaactacctggagtaccggcaggtccccggcagtgatcctgcatgttatgaattcctgtggggtccaagggccctcgttgaaaccagctatgtgaaagtcctgcaccatatggtaaagatcagtggaggacctcacatttcctacccacccctgcatgagtgggttttgagagagggggaagagtgagtctgagcacgagttgcagccagggccagtgggagggggtctgggccagtgcaccttccggggccgcatcccttagtttccactgcctcctgtgacgtgaggcccattcttcactctttgaagcgagcagtcagcattcttagtagtgggtttctgttctgttggatgactttgagattattctttgtttcctgttggagttgttcaaatgttccttttaacggatggttgaatgagcgtcagcatccaggtttatgaatgacagtagtcacacatagtgctgtttatatagtttaggagtaagagtcttgttttttactcaaattgggaaatccattccattttgtgaattgtgacataataatagcagtggtaaaagtatttgcttaaaattgtgagcgaattagcaataacatacatgagataactcaagaaatcaaaagatagttgattcttgccttgtacctcaatctattctgtaaaattaaacaaatatgcaaaccaggatttccttgacttctttgagaatgcaagcgaaattaaatctgaataaataattcttcctcttcactggctcgtttcttttccgttcactcagcatctgctctgtgggaggccctgggttagtagtggggatgctaaggtaagccagactcacgcctacccatagggctgtagagcctaggacctgcagtcatataattaaggtggtgagaagtcctgtaagatgtagaggaaatgtaagagaggggtgagggtgtggcgctccgggtgagagtagtggagtgtcagtgc

SEQ ID NO: 748 - DNA, 850 bp, Homo sapiens
gggcctggagctgcacccgcttctgggtggacgcacttggcgagcggcgcgggatgcagacggctgcgaggcgctgggcacagttgctgtcccctttgacgatgatgacaagattgttgggggctacacctgtgagaattctctcccctaccaggtgtccctgaattctggctcccacttctgcggtggctccctcatcagcgaacagtgggtggtatcagcagctcactgctacaagacccgcatccaggtgagactgggagagcacaacatcaaagtcctggaggggaatgagcagttcatcaatgcggccaagatcatccgccaccctaaatacaacagggacactctggacaatgacatcatgctgatcaaactctcctcacctgccgtcatcaatgcccgcgtgtccaccatctctctgcccaccgcccctccagctgctggcactgagtgcctcatctccggctggggcaacactctgagctttggtgctgactacccagacgagctgaagtgcctggatgctccggtgctgacccaggctgagtgtaaagcctcctaccctggaaagattaccaacagcatgttctgtgtgggcttccttgagggaggcaaggattcctgccagcgtgactctggtggccctgtggtctgcaacggacagctccaaggagttgtctcctggggccatggctgtgcctggaagaacaggcctggagtctacaccaaggtctacaactatgtggactggattaaggacaccatcgctgccaacagctaaagcccccggtccctctgcagtctctataccaataaagtggccctgctctcaaaaaaaaaaaaaaaa

SEQ ID NO: 749 - DNA, 141 bp, Homo sapiens
aagatcgcggactttggttttaacaggatttctctggctcctgtgttgattgagggggcggggggcagtatacagcagggagaactttgggaaactcttgaaattattgaagtaagagacatggacgtctgggcgttcgga

SEQ ID NO: 750 - DNA, 1539 bp, Homo sapiens
atggacctcaaggaaagccccagtgagggcagcctgcaaccttctagcatccagatctttgccaacacctccaccctccatggcatccgccacatcttcgtgtatgggccgctgaccatccggcgtgtgctgtgggcagtggccttcgtgggctctctgggcctgctgctggtggagagctctgagagggtgtcctactacttctcctaccagcatgtcactaaggtggacgaagtggtggctcaaagcctggtcttcccagctgtgaccctctgtaacctcaatggcttccggttctccaggctcaccaccaacgacctgtaccatgctggggagctgctggccctgctggatgtcaacctgcagatcccggacccccatctggctgacccctccgtgctggaggccctgcggcagaaggccaacttcaagcactacaaacccaagcagttcagcatgctggagttcctgcaccgtgtgggccatgacctgaaggatatgatgctctactgcaagttcaaagggcaggagtgcggccaccaagacttcaccacagtgtttacaaaatatgggaagtgttacatgtttaactcaggcgaggatggcaaacctctgctcaccacggtcaagggggggacaggcaacgggctggagatcatgctggacattcagcaggatgagtacctgcccatctggggagagacagaggaaacgacatttgaagcaggagtgaaagttcagatccacagtcagtctgagccacctttcatccaagagctgggctttggggtggctccagggttccagacctttgtggccacacaggagcagaggctcacatacctgcccccaccgtggggtgagtgccgatcctcagagatgggcctcgacttttttcctgtttacagcatcaccgcctgtaggattgactgtgagacccgctacattgtggaaaactgcaactgccgcatggttcacatgccaggggatgcccctttttgtacccctgagcagcacaaggagtgtgcagagcctgccctaggtctgttggcggaaaaggacagcaattactgtctctgcaggacaccctgcaacctaacccgctacaacaaagagctctccatggtgaagatccccagcaagacatcagccaagtaccttgagaagaaatttaacaaatcagaaaaatatatctcagagaacatccttgttctggatatattttttgaagctctcaattatgagacaattgaacagaagaaggcgtatgaagttgctgccttacttggtgatattggtggtcagatgggattgttcattggtgctagtatccttacaatactagagctctttgattatatttatgagctgatcaaagagaagctattagacctgcttggcaaagaggaggacgaagggagccacgatgagaatgtgagtacttgtgacacaatgccaaaccactctgaaaccatcagtcacgctgtgaacgtgcccctgcagacgaccctggggaccttggaggagattgcctgctga

SEQ ID NO: 751 - DNA, 334 bp, Homo sapiens
ttttccacacttggccagtttattaaaggcagggagcttcggcagggtccaaaagggagaagttgggagatgccccctcctcagctccctccttccccaacaactcttctacagcccagcccccagggcccagaggcagggctggcgtcaggcagactgtactgcataaatacgtggaggccacagcccgaatcagcagcgtcagggggcagggaaactgggtttgggatgagaagtgggtggctctgggggcacgtcccccagtgcttgtccagagcccagggacccacagagccagagaggggaccagtgggccagcttggggtctggctac

SEQ ID NO: 752 - DNA, 401 bp, Homo sapiens
ttttttttgctgccagctgcatttattgtagcatgtacaaaccactcacagccagcgcctgtcaggggcccaggacactggccagcggggccaaggagccacattgctgggcacatgccccataccctggccacccggcagcagtgcccagcatccctcaatgacagagcagccaggaccccagcggtgactgtcccagaggacctacaggggcatggggccaaagctgggtcctgcaccttgtttggcctgcagatttgatttctgaattaatttctgccaacaacttaaaaaatcaggacatctcacatacaaatctgtatttctggcttctccagatttctgtcattaggcctgcattcccacaccagagcaattagctacacctgaatatggcagcg

SEQ ID NO: 753 - DNA, 642 bp, Homo sapiens
tcgtgttcatgggagctcgttttcttttcctctaggcagagaagaggcgatggcggcgatggcatctctcggcgccctggcgctgctcctgctgtccagcctctcccgctgctcagccgaggcctgcctggagccccagatcaccccttcctactacaccacttctgacgctgtcatttccactgagaccgtcttcattgtggagatctccctgacatgcaagaacagggtccagaacatggctctctatgctgacgtcggtggaaaacaattccctgtcactcgaggccaggatgtggggcgttatcaggtgtcctggagcctggaccacaagagcgcccacgcaggcacctatgaggttagattcttcgacgaggagtcctacagcctcctcaggaaggctcagaggaataacgaggacatttccatcatcccgcctctgtttacagtcagcgtggaccatcggggcacttggaacgggccctgggtgtccactgaggtgctggctgcggcgatcggccttgtgatctactacttggccttcagtgcgaagagccacatccaggcctgagggcggcaccccagccctgcccttgcttccttcaataaacatcacaggacctgggactgcacaggaaaaaa

SEQ ID NO: 754 - DNA, 1361 bp, Homo sapiens
cattcggggacgctctcagctctcgactcactgcccagcttccttcaaaatgtcaactgatctcgaaatcctgtgcaagctcagcttggagggtgctcactctacaccctcaggtgcatatgggtcagtcaaagcctacaccaactttgatgctgagggggatgctttgaacattgaaaggaccatcaggacaaaaggtgtgggtaagttcaccattgtcaacattttgaccaacagcaggaatgctcggagagaggatgttgcctttgcctagcagagaaggaccacaaaggaacttacatcagcactgaagtcagccttactggccacctggagacagtcattttgggcctattgaagacacctgctcagtatgatgcttctgagctaaaagcttccatgaaggggctgggaactgaggaggactccctcgttgagatcatctgctcaacaaccaaccaggagctccaggaaattaacagagtctacaaagaaatgtacaaaactgatctggagaaggacattatttcggacacatatggtgacttctgcaagctgatgtttgccctggcaaatgttagaagaccagaggatggctctgtcgttgattatgaactgattgaccaagatgcccgggatttctgtgatgctggagtgaagaggaaaagaactgatgttcccaagtggatcagcatgatgaccgagtagagcatgtcccacctccagaaagtatttgataggtacaagagctacagcccttatgacatgttggaaagcatcaagaaagaggttaaaggagacctggaaaatgctttcctgaacctggtccagtgcattcagaacaagcccctgtattttgctgattggctgtactactccatgaagggccagggggctcgagataaggtcctgatcagaatcatcgtctcccgcagtgaagtggacatgttgaaaattaggtctgaattcaagagaaagtatggcatgtccctgtactactatatccagcaagacactaagaacgactaccagaaagcactgctgtacctgtgtggtggagatgactgaagcccaacatagcttgagcttccagaaacggtgctccccacgcttccagctaacaggtctagaaaaccagcttgtggctaacagtccctgtggccgtccctgtgaagatgacattagcattgcccccaacctcattttagttgcgtaagcatagcctggctttcctgtctagtctctcctgtaagccaaagaaatgtacattccaagcagttggaagtgaaatctatgatgtgaaacactttgcctcctgtgtactgtgtcataaacagatgaataaactgaatttgtacttt

SEQ ID NO: 755 - DNA, 409 bp, Homo sapiens
ttttttttaggtaaaacaggatgtaaagtttatatacaagaatataatgtttatctgaaatatttacagtgttggttaaagcaatatttttacaacttttaaaggtaaactactatgtatattacaggtaagctacaatgggtttaatttgcaaaagttaagtaagaaatgttttaaacaaggcttaaagtactcaagtcaattataaaatttatatcttttgccttttacttgaagaaatcatgctatagaaatggttaatgtgcttctaataaatggaagtattgtagctggaatgtgatacatgtaacagtttaagttcccattgaaggtataaaatgatgaattgttgtaagacttagacactgagtctcagtctggagctgatgaagatgttgagataacagcc

SEQ ID NO: 756 - DNA, 449 bp, Homo sapiens
ttatttagaaagtatcatagtgtaaacaaacaaattgtaccactttgattttcttggaatacaagactcgtgatgcaaagctgaagttgtgtgtacaagactcttgacagttgtgcttctctaggaggttgggtttttttaaaaaaagaattatctgtgaaccatacgtgattaataaagatttcctttaaggcagaggctggtcgagatgctgctgttatcttctgcctcagacagacagtataagtggtcttgtttctaagattcctaccaccagttactttgggccaagtatccacatccccttgcgtatgggaggtgggtgaagagtgttggatgcaaagtggttattatgggaagtagctcgatggtaaaaggacaaacacctatctatcttagagcttaagcctgtatgtgcttattcccaagggagatagaggtgtttaatc

SEQ ID NO: 757 - DNA, 214 bp, Homo sapiens
ttttgctttttaatacaacatttatttatttaattgttttgagatggaggtcttgtcatgttacccaggctggacttgaacttctgggctgaacctcctgagtagctgggactacagatgcgtaccaccacacccggcccggcatgatataaacacttaaacaaaaattttaataaggattagtttttgttcatagggagaagggcccatgagg

SEQ ID NO: 758 - DNA, 468 bp, Homo sapiens
tcctctgtccacacaggtcagcccaaggccaccccctcggtcactctgttcctgccgtcctctgaggagctccaagccaacaaggccacactggtgtgtctcatgaatgacttctatctgggaatcttgacggtgacctggaaggcagatggtacccccatcacccagggcgtggagatgaccacgccctccaaacagagcaacagcaagtacatggccagcagctacctgagcctgacgcccgagcagtggaggtcccgcagaagctacagctgccaggtcatgcacgaagggagcactgcagagaagacggtggcccctgcagaatgttcataggttcccagcccccagcccacccacaggaggcctggagctgcaggatcccaggggaggggtctctctccccatcccaagtcatccagcccttctccctgcactcatgaaaccccaataaatatcctcattgac

SEQ ID NO: 759 - DNA, 277 bp, Homo sapiens
ttttaaagtgcttctttttaatgaaacaaatccaagagatgtacagtcaggctcaagttgtgcagttcacaagcatggaggaaacagacagaacgacagcgttcaggacagtcagagctaacccaagacgaggctggacttgccgccaaggggatttcttctggatggcactggggccggggcaccgggctgggcacaggcgcacaggcacgggcttctcttcactctgccccaggctgcctggcaagtctgtgtccacattttcatgaatatcacc

SEQ ID NO: 760 - DNA, 1157 bp, Homo sapiens
ccccagcggaggtgaaggacgtccttccccaggagccgactggccaatcacaggcaggaagatgaaggttctgtgggctgcgttgctggtcacattcctggcaggatgccaggccaaggtggagcaagcggtggagacagagccggagcccgagctgcgccagcagaccgagtggcagagcggccagcgctgggaactggcactgggtcgcttttgggattacctgcgctgggtgcagacactgtctgagcaggtgcaggaggagctgctcagctcccaagtcacccaagaactgagggcgctgatggacgagaccatgaaggagttgaaggcctacaaatcggaactggaggaacaactgaccccggtagcggaggagacgcgggcacggctgtccaaggagctgcagacggcgcaggcccggctgggcgcggacatggaggacgtgtgcggccgcctggtgcagtaccgcggcgaggtgcaggccatgctcggccagagcaccgaggagctgcgggtgcgcctcgcctcccacctgcgcaagctgcgtaagcggctcctccgcgatcccgatgacctgcagaagcgcctggcagtgtaccaggccggggcccgcgagggcgccgagcgcggcctcagcgccatccgcgagcgcctggggcccctggtggaacagggccgcgtgcgggccgccactgtgggctccctggccggccagccgctacaggagcgggcccaggcctggggcgagcggctgcgcgcgcggatggaggagatgggcagtcggacccgcgaccgcctggacgaggtgaaggagcaggtggcggaggtgcgcgccaagctggaggagcaggcccagcagatacgcctgcaggccgaggccttccaggcccgcctcaagagctggttcgagcccctggtggaagacatgcagcgccagtgggccgggctggtggagaaggtgcaggctgccgtgggcaccagcgccgcccctgtgcccagcgacaatcactgaacgccgaagcctgcagccatgcgaccccacgccaccccgtgcctcctgcctccgcgcagcctgcagcgggagaccctgtccccgccccagccgtcctcctggggtggaccctagtttaataaagattcaccaagtttcacgc

SEQ ID NO: 761 - DNA, 511 bp, Homo sapiens
ttttttttttttttttttcaaggggaaactggggcagttttattgacgatggcaatgtacaagactccacacctaggtatgtgcacgaggtaaggcctgagctcaggccttatgatcctcctcaggacccttgggggcaaacttctcctgcagtttcttccacatgcctttatctatttccttaagctcttccaaggtgtctgtggacaggatcagcttgtactcttccaacgacaggccactgaagctggtgtctctggggcgagggtacttgtgtttgtagtagtttgaatggagtcgcgctaagtctcgtacatctgatcacaggcctcaggtctgcaacctgggtattctctccctcccgaaaggcctgtgctacccgctgtcgcaggtaagcgcccaagtcccggccccgtttggtctcgtccactggccattcctcacagagcttaagaaaacgccggtaccgtgggccgccatttgggccccgcgtgttcccgcccctcgtgcc

SEQ ID NO: 762 - DNA, 6158 bp, Homo sapiens
  misc_feature: n=a,t,g or c
aaccatcaaatttagaagaaaaagccctttgactttttccccctctccctccccaatggctgtgtagcaaacatccctggcgataccttggaaaggacgaagttggtctgcagtcgcaatttcgtgggttgagttcacagttgtgagtgcggggctcggagatggagccgtggtcctctaggtggaaaacgaaacggtggctctgggatttcaccgtaacaaccctcgcattgaccttcctcttccaagctagagaggtcagaggagctgctccagttgatgtactaaaagcactagattttcacaattctccagagggaatatcaaaaacaacgggattttgcacaaacagaaagaattctaaaggctcagatactgcttacagagtttcaaagcaagcacaactcagtgccccaacaaaacagttatttccaggtggaactttcccagaagacttttcaatactatttacagtaaaaccaaaaaaaggaattcagtctttccttttatctatatataatgagcatggtattcagcaaattggtgttgaggttgggagatcacctgtttttctgtttgaagaccacactggaaaacctgccccagaagactatcccctcttcagaactgttaacatcgctgacgggaagtggcatcgggtagcaatcagcgtggagaagaaaactgtgacaatgattgttgattgtaagaagaaaaccacgaaaccacttgatagaagtgagagagcaattgttgataccaatggaatcacggtttttggaacaaggattttggatgaagaagtttttgagggggacattcagcagtttttgatcacaggtgatcccaaggcagcatatgactactgtgagcattatagtccagactgtgactcttcagcacccaaggctgctcaagctcaggaacctcagatagatgagtatgcaccagaggatataatcgaatatgactatgagtatggggaagcagagtataaagaggctgaaagtgtaacagagggacccactgtaactgaggagacaatagcacagacggaggcaaacatcgttgatgattttcaagaatacaactatggaacaatggaaagttaccagacagaagctcctaggcatgtttctgggacaaatgagccaaatccagttgaagaaatatttactgaagaatatctaacgggagaggattatgattcccagaggaaaaattctgaggatacactatatgaaaacaaagaaatagacggcagggattctgatcttctggtagatggagatttaggcgaatatgatttttatgaatataaagaatatgaagataaaccaacaagcccccctaatgaagaatttggtccaggtgtaccagcagaaactgatattacagaaacaagcataaatggccatggtgcatatggagagaaaggacagaaaggagaaccagcagtggttgagcctggtatgcttgtcgaaggaccaccaggaccagcaggacctgcaggtattatgggtcctccaggtctacaaggccccactggaccccctggtgaccctggcgataggggccccccaggacgtcctggcttaccaggggctgatggtctacctggtcctcctggtactatgttgatgttaccgttccgttatggtggtgatggttccaaaggaccaaccatctctgctcaggaagctcaggctcaagctattcttcagcaggctcggattgctctgagaggcccacctggcccaatgggtctaactggaagaccaggtcctgtgggggggcctggttcatctggggccaaaggtgagagtggtgatccaggtcctcagggccctcgaggcgtccagggtccccctggtccaacgggaaaacctggaaaaaggggtcgtccaggtgcagatggaggaagaggaatgccaggagaacctggggcaaagggagatcgagggtttgatggacttccgggtctgccaggtgacaaaggtcacaggggtgaacgaggtcctcaaggtcctccaggtcctcctggtgatgatggaatgaggggagaagatggagaaattggaccaagaggtcttccaggtgaagctggcccacgaggtttgctgggtccaaggggaactccaggagctccagggcagcctggtatggcaggtgtagatggccccccaggaccaaaagggaacatgggtccccaaggggagcctgggcctccaggtcaacaagggaatccaggacctcagggtcttcctggtccacaaggtccaattggtcctcctggtgaaaaaggaccacaaggaaaaccaggacttgctggacttcctggtgctgatgggcctcctggtcatcctgggaaagaaggccagtctggagaaaagggggctctgggtccccctggtccacaaggtcctattggatnnccgggcccccggggagtaaagggagcagatggtgtcagaggtctcaagggatctaaaggtgaaaagggtgaagatggttttccaggattcaaaggtgacatgggtctaaaaggtgacagaggagaagttggtcaaattggcccaagagggnaagatggccctgaaggacccaaaggtcgagcaggcccaactggagacccaggtccttcaggtcaagcaggagaaaagggaaaacttggagttccaggattaccaggatatccaggaagacaaggtccaaagggttccactggattccctgggtttccaggtgccaatggagagaaaggtgcacggggagtagctggcaaaccaggccctcggggtcagcgtggtccaacgggtcctcgaggttcaagaggtgcaagaggtcccactgggaaacctgggccaaagggcacttcaggtggcgatggccctcctggccctccaggtgaaagaggtcctcaaggacctcagggtccagttggattccctggaccaaaaggccctcctggaccaccaggaaggatgggctgcccaggacaccctgggcaacgtggggagactggatttcaaggcaagaccggccctcctgggccagggggagtggttggaccacagggaccaaccggtgagactggtccaataggggaacgtgggtatcctggtcctcctggccctcctggtgagcaaggtcttcctggtgctgcaggaaaagaaggtgcaaagggtgatccaggtcctcaaggtatctcagggaaagatggaccagcaggattacgtggtttcccaggggaaagaggtcttcctggagctcagggtgcacctggactgaaaggaggggaaggtccccagggcccaccaggtccagttggctcaccaggagaacgtgggtcagcaggtacagctggcccaattggtttacgagggcgcccgggacctcagggtcctcctggtccagctggagagaaaggtgctcctggagaaaaaggtccccaagggcctgcagggagagatggagttcaaggtcctgttggtctcccagggccagctggtcctgccggctcccctggggaagacggagacaagggtgaaattggtgagccgggacaaaaaggcagcaagggtggcaagggagaaaatggccctcccggtcccccaggtcttcaaggaccagttggtgcccctggaattgctggaggtgatggtgaaccaggtcctagaggacagcaggggatgtttgggcaaaaaggtgatgagggtgccagaggcttccctggacctcctggtccaataggtcttcagggtctgccaggcccacctggtgaaaaaggtgaaaatggggatgttggtccatgggggccacctggtcctccaggcccaagaggccctcaaggtcccaatggagctgatggaccacaaggacccccaggttctgttggttcagttggtggtgttggagaaaagggtgaacctggagaagcaggaaacccagggcctcctggggaagcaggtgtaggcggtcccaaaggagaaagaggagagaaaggggaagctggtccacctggagctgctggacctccaggtgccaaggggccgccaggtgatgatggccctaagggtaacccgggtcctgttggttttcctggagatcctggtcctcctggggaacttggccctgcaggtcaagatggtgttggtggtgacaagggtgaagatggagatcctggtcaaccgggtcctcctggcccatctggtgaggctggcccaccaggtcctcctggaaaacgaggtcctcctggagctgcaggtgcagagggaagacaaggtgaaaaaggtgctaagggggaagcaggtgcagaaggtcctcctggaaaaaccggcccagtcggtcctcagggacctgcaggaaagcctggtccagaaggtcttcggggcatccctggtcctgtgggagaacaaggtctccctggagctgcaggccaagatggaccacctggtcctatgggacctcctggcttacctggtctcaaaggtgaccctggctccaagggtgaaaagggacatcctggtttaattggcctgattggtcctccaggagaacaaggggaaaaaggtgaccgagggctccctggaactcaaggatctccaggagcaaaaggggatgggggaattcctggtcctgctggtcccttaggtccacctggtcctccaggcttaccaggtcctcaaggcccaaagggtaacaaaggctctactggacccgctggccagaaaggtgacagtggtcttccagggcctcctgggcctccaggtccacctggtgaagtcattcagcctttaccaatcttgtcctccaaaaaaacgagaagacatactgaaggcatgcaagcagatgcagatgataatattcttgattactcggatggaatggaagaaatatttggttccctcaattccctgaaacaagacatcgagcatatgaaatttccaatgggtactcagaccaatccagcccgaacttgtaaagacctgcaactcagccatcctgacttcccagatggtgaatattggattgatcctaaccaaggttgctcaggagattccttcaaagtttactgtaatttcacatctggtggtgagacttgcatttatccagacaaaaaatctgagggagtaagaatttcatcatggccaaaggagaaaccaggaagttggtttagtgaatttaagaggggaaaactgctttcatacttagatgttgaaggaaattccatcaatatggtgcaaatgacattcctgaaacttctgactgcctctgctcggcaaaatttcacctaccactgtcatcagtcagcagcctggtatgatgtgtcatcaggaagttatgacaaagcacttcgcttcctgggatcaaatgatgaggagatgtcctatgacaataatccttttatcaaaacactgtatgatggttgtacgtccagaaaaggctatgaaaaaactgtcattgaaatcaatacaccaaaaattgatcaagtacctattgttgatgtcatgatcagtgactttggtgatcagaatcagaagttcggatttgaagttggtcctgtttgttttcttggctaagattaagacaaagaacatatcaaatcaacagaaaatgtaccttggtgccaccaacccattttgtgccacatgcaagttttgaataaggatgtatggaaaacaacgctgcatatacaggtaccatttaggaaataccgatgcctttgtgggggcagaatcacagacaaaagctttgaaaatcataaagatataagttggtgtggctaagatggaaacagggctgattcttgattcccaattctcaactctccttttcctatttgaatttctttggtgctgtagaaaacaaaaaaagaaaaatatatattcataaaaaatatggtgctcattctcatccatccaggatgtactaaaacagtgtgtttaataaattgtaattattttgtgtacagttctatactgttatctgtgtccatttccaaaacttgcacgtgtccctgaattccgctgactctaatttatgaggatgccgaactctgatggcaataatatatgtattatgaaaatgaagttatgatttccgatgaccctaagtccctttctttggttaatgatgaaattcctttgtgtgtgttt

SEQ ID NO: 763 - DNA, 468 bp, Homo sapiens; identical to SEQ ID NO: 758

SEQ ID NO: 764 - DNA, 541 bp, Homo sapiens
gtttattaggcagcagctgggaaatcagcggttagacttggccacacgctccagttcatctttcttcttgatggcataggaattggaggagcccttggagcattaatgagctcatctgcaaggcactcggcgatggtcttgatgttccggaaagcagcctcacgagcccctgtgcacagcagccagatggcctgattcactcgacgcagtggggacacatccacagcctgtcgtctcactgtaccggcccgcccaatgcgtgttgagtcttctcgggggccactgttgatgatagcattcaccaggacctgcagagggttctcaccagtgagcaggtggatgatctcaaaggcatgcttgacaattcgcacagtcatgagcttcttgccgttgttacgaccatgcatcatcatggagttagtaaggcgctccacgatgggacattgtgctttgcggaagcttggcagcataccgtccggcactgtggggcaggtacttggcatacttctccttcacagcaatgtaatcctgcagagaaata

SEQ ID NO: 765 - DNA, 408 bp, Homo sapiens
gaacaagtacaaatttagcaattttaatcaatattcttgcagacaagtgtggatatgtatatgcatatatacatatatatatcaaaattgagaatttacaaataagatttgatacatttattctagcagtgggtaagtccatagagtaaatttcaagtaggatatatttattttctttggtggtgtttttaataattcctttctactgcatacaaagggacctgaagcttaaattcagttagttttggagaaatccaaaatgagaaaaacagaaagcatgtagcattccatgaagcaagaacagcgtgcatatgctattcctggaaatactgaagtgtccgaatttcatgcctaaaaagtctgggaaatcacactgaatcagttgctggtttctgatgtctctgggat

SEQ ID NO: 766 - DNA, 469 bp, Homo sapiens
  misc_feature: n=a,t,g or c
cataatattaagtagcccattaacctttccctttaaacaggccttttgatgttagttcttataccaaaaaaaaaaaaaaaaaacccaaaaccaaaaaacaaaccaacaatacatgaagatgtaagggaagagattaatgagatacaattcattaagtataaaaatatgttgtttcaaattcagaataatttaataactcttcgttatttcatatgtatctggaaatgggacagatacgtgtcctgatcctgtcacaagaggtagaattccagcatttggtacgacgttccaagacagggtcaaagtgacattcctgtttcccttgagaccatttccatcgtcaaagaaaaaatattttgttttcatatctttcagcagcagcttcggattatcacctctcaaaacaatcttgtcccataggacaacttggttcagagcattattttttggtgaatattcngctgataan

SEQ ID NO: 767 - DNA, 381 bp, Homo sapiens
gctcttctggactaagtgttgattcatcaacatcaaccaatagtttatcaaagtattgaatatcatcaggttttaaaaatggaagatttccagatggctggtcattaacacttttcatagttcgatcttcagtttgcatgtggaaaccagtcataccacccaaaggtgttggagtagctgtcagctttcgagctggagttcgaataggaacataaccagctggaggaggaagtaccttatatccttctgggaacatagcatctaattcctcatcagaaagtgggcgatttctctcatcaatttctctttcccaccgccaagcctgaagctgttcaggagtcatactcattatgtgacctggagtaggggtagcatgttcat

SEQ ID NO: 768 - DNA, 318 bp, Homo sapiens
tttgacaaaagcgtgcatttaatttgatgctttgcagagatacatgaccaaagttgtatgcatggcttgtcttttgggatggtcccagctgtttattttaaaagaaaaaaattaaaatagagccaacaaatgcaattaagaaaaaaaaagtattgagacacaaggggacctacatgttctggtctaagaagcatgcaagtattacaaagcattccagatacagtatgacagaggaacagtgaacaagcattggaacgatgctctttctttcagaaacgggaagtctaacagttatgttttcacaatggtagtgattaa

SEQ ID NO: 769 - DNA, 207 bp, Homo sapiens
  misc_feature: n=a,t,g or c
tttttttttttttttttttttttttttttttttttttttttttttggcggaaggcagtcatagcaccatttattgtccaaagtacacacacctgagggcccctccccacacagggaaacaggagaaacaaatgacaacaaaacagattctttggaaccgagangggaaggggaacggggaggggagtttcttccttccctcagcttt

SEQ ID NO: 770 - DNA, 239 bp, Homo sapiens
aagctagaaaaaggccaaaaagcaaaacctgagaaaacaatacgtgttgttttctcaggaaaagaaaaaccttcatgaccctactgaagagcattggagatcagcttccgctaagatgctagcttggccaagtctgttatgttcacctgaaaaagtcttagcagagaatttttgcattcccacccaaaagccctctcagccactcaaatgcctatcttctccagtctacaagttacatg

SEQ ID NO: 771 - DNA, 1244 bp, Homo sapiens
atggaagccccagctcagcttctcttcctcctgctactctggctcccagataccaccggagaaattgtgttgacacagtctccagccaccctgtctttgtctccaggggaaagagccaccctctcctgcagggccagtcagagtgttggcagctacttagcctggtaccaacagaaacctggccaggctcccaggcccctcatctatgatgcatccaacagggccactggcatcccagccaggttcagtggcagtgggtctgggacagacttcactctcaccatcagcagcctagagcctgaagattttgcagtttattactgtcaacaccgtgacaattggcctccgggggccactttcggcggagggaccaaggtggagatcaaacataccaccggagaaattgtgttgacacagtctccagccaccctgtctttgtctccaggggaaagagccaccctctcctgcagggccagtcagagtgttggcagctacttagcctggtaccaacagaaacctggccaggctcccaggcccctcatctatgatgcatccaacagggccactggcatcccagccaggttcagtggcagtgggtctgggacagacttcactctcaccatcagcagcctagagcctgaagattttgcagtttattactgtcaacaccgtgacaattggcctccgggggccactttcggcggagggaccaaggtggagatcaaacgaactgtggctgcaccatctgtcttcatcttcccgccatctgatgagcagttgaaatctggaactgcctctgttgtgtgcctgctgaataacttctatcccagagaggccaaagtacagtggaaggtggataacgccctccaatcgggtaactcccaggagagtgtcacagagcaggacagcaaggacagcacctacagcctcagcagcaccctgacgctgagcaaagcagactacgagaaacacaaagtctacgcctgcgaagtcacccatcagggcctgagctcgcccgtcacaaagagcttcaacaggggagagtgttagagggagaagtgcccccacctgctcctcagttccagcctgaccccctcccatcctttggcctctgaccctttttccacaggggacctacccctattgcggtcctccagctcatctttcacctcacccccctcctcctccttggctttaattatgctaatgttggaggagaatgaataaataaagtgaatctttgc

SEQ ID NO: 772 - DNA, 450 bp, Homo sapiens
tgagcgtgtccggcttcgaggagttccaccgggccgtggaacagcacaatggcaagaccattttcgcctactttacgggttctaaggacgccggggggaaaagctggtgccccgactgcgtgcaggctgaaccagtcgtacgagaggggctgaagcacattagtgaaggatgtgtgttcatctactgccaagtaggagaaaagccttattggaaagatccaaataatgacttcagaaaaaacttgaaagtaacagcagtgcctacactacttaagtatggaacacctcaaaaactggtagaatctgagtgtcttcaggccaacctggtggaaatgttgttctctgaagattaagattttaggatggcaatcatgtcttgatgtcctgatttgttctagtatcaataaactgtatacttgctttgaattcatgttagcaataaatgatgtt

SEQ ID NO: 773 - DNA, 280 bp, Homo sapiens
gaccagtttcaccatcttttttattggatacagagccataaattctctgatgcccatgtgagtccttttaaatacatacactcaggtacattcagcaaagggcatcttacgggtgacatggagcaaagtgctgggatggcgatgcctgggtggggcagagaagtgtggccagggaaggccccctgggcgctggaggtacaggcaccacttcagaaacaaaaataaaaccaaaaattgctctccacccctctgcctgtgcttggggctggggaagctaccc

SEQ ID NO: 774 - DNA, 154 bp, Homo sapiens
tttttttttttttttttttagagatggaatcgcaagaattcccaggccctctttttatttacagtgataccaaaccatccacttgcaaattctttggtctcccatcagctggaattaagtaggtactgtgtatctttgagatcatgtatttgtc

SEQ ID NO: 775 - DNA, 524 bp, Homo sapiens
  misc_feature: n=a,t,g or c
tcatagaccaacattctttaatcacaaaggcacttgaggacccctacaaacccaaagtctctgccaagagtggccctgcagacgccccacctgccaccctccatccacccatccatccacacactcagagttcatcgtgacctgcagagggctccacactaggcttgatgaagatgccttccatggccttccacgtattgtgcgtgttggcactggggcatgccgtggacctcatgctgcccacggatggggcttccatactgctcacccgtgactgacaggaacacagaggtgcccacatgctnggaaggcacagcagcctcacgctcccagtngctgttccagagcagcgcactgtccataaggttccaggtcgtcgccctcgccgtcttccccaaaggcactcacctcctggttgttggacagcggcgagggaagtggtgcgtgtgcaggttctttgnccgtaagcacatgcgtganccttcaccgnctgcccgcagcgcaccggggaacccgcgcgggaa

SEQ ID NO: 776 - DNA, 425 bp, Homo sapiens
  misc_feature: n=a,t,g or c
ccaggncctctttttatttacagngataccaaaccatccacttgcaaattctttggnctcccatcagctggaattaagtaggnactgtgtanctttgagancangtatttgtctccactttggnggatacaagaaaggaaggcacgaacagctgaaaaagaagggtatcacaccgctccagctggaatccagcaggaacctctgagcatgccacagctgaacacttaaaagaggaaagaaggacagctgctcttcatttattttgaaagcaaattcatttgaaagtgcataaatgggncatcataaggtcaaacgtatcaattaggnccttcaacctaggggaacaaaattttttttttcnatttaataatacaccncactgaaattatttgccnatggatnccccaaggtttggggacaatagg

SEQ ID NO: 777 - DNA, 451 bp, Homo sapiens
tttttcgttaaaggtatttttattgctagtacaagattgcaggatctaggcaaataatataacaattaaatgtgcaaatctcatgaaggtaaactacctttctgttctgtaatatttacccaaatagtcaaggctcagacttgttaaactgtggagttactaaagaaggggggattttccaaattgtagaaacaagagtagtcagattttcccatccctactagctttctaggttaaattcaatgatgtgaaaacaagcatagggtagagtccatatgatattcatacaggaagaatgtccactggggaagctctttcggccctcattcaccacgtccttatcccctgtacacatcaagtcagaatgggctagccatcagggaagcagcggtagaagaaatctgggcgtggctccctacgatcagttttattgtgttggtaaagacgccat

SEQ ID NO: 778 - DNA, 126 bp, Homo sapiens
acttttggtttcatattttttcagttaatttcagtaaaaacataatatataaaaggcattgccaccattttcccctcctgggggtgatccatcaagccagtgtgggctgctccagtggttcatagc

SEQ ID NO: 779 - DNA, 147 bp, Homo sapiens
ctgcacatatcgcatgatgagctatgaaccactggagcagcccacactggcttgatggatcacccccaggaggggaaaatggtggcaatgccttttatatattatgtttttactgaaattaactgaaaaaatatgaaaccaaaagta

SEQ ID NO: 780 - DNA, 269 bp, Homo sapiens
cccagggcagtggtgggtgctttatttccatgctgggtgcctgggaagtatgtagacggggtacgtgccaagcatcctcgtgcaaccggagagcccggggaggggctctgcggccgtcgcactcatttacccggggacaggagaggctcttctcgtgtagtggttgtgcagaccttatgcatcacgggcatgagaagacgttcccctgctgccacctgctcttgtccacggtgagcttgctatagaggaagaaggagccgtcggagtcc

SEQ ID NO: 781 - DNA, 1799 bp, Homo sapiens
cctctctgtgctgggttcctccagtgtagaggagaggcaggtacagcctgtcctcctggggacatggcatgagggccgcgtcctcacagcgcattctgtgttccagcatccccgaccagccccaaggtcttcccgctgagcctcgacagcaccccccaagatgggaacgtggtcgtcgcatgcctggtccagggcttcttcccccaggagccactcagtgtgacctggagcgaaagcggacagaacgtgaccgccagaaacttcccacctagccaggatgcctccggggacctgtacaccacgagcagccagctgaccctgccggccacacagtgcccagacggcaagtccgtgacatgccacgtgaagcactacacgaattccagccaggatgtgactgtgccctgccgaggtcagagggcaggctggggagtggggcggggccaccccgtcctgccctgacactgcgcctgcacccgtgttccccacagggagccgccccttcactcacaccagagtggaccgcgggccgagccccaggaggtggtggtggacaggccaggaggggcgaggcgggggcacggggaagggcgttctgaccagctcaggccatctctccactccagttcccccacctcccccatgctgccacccccgactgtcgctgcaccgaccggccctcgaggacctgctcttaggttcagaagcgaacctcacgtgcacactgaccggcctgagagatgcctctggtgccaccttcacctggacgccctcaagtgggaagagcgctgttcaaggaccacctgagcgtgacctctgtggctgctacagcgtgtccagtgtcctgcctggctgtgcccagccatggaaccatggggagaccttcacctgcactgctgcccaccccgagttgaagaccccactaaccgccaacatcacaaaatccggtgggtccagaccctgctcggggccctgctcagtgctctggtttgcaaagcatattcccggcctgcctcctccctcccaatcctgggctccagtgctcatgccaagtacagagggaaactgaggcaggctgaggggccaggacacagcccagggtgcccaccagagcagaggggctctctcatcccctgcccagccccctgacctggctctctaccctccaggaaacacattccggcccgaggtccacctgctgccgccgccgtcggaggagctggccctgaacgagctggtgacgctgacgtgcctggcacgtggcttcagccccaaggatgtgctggttcgctggctgcaggggtcacaggagctgccccgcgagaagtacctgacttgggcatcccggcaggagcccagccagggcaccaccaccttcgctgtgaccagcatactgcgcgtggcagccgaggactggaagaagggggacaccttctcctgcatggtgggccacgaggccctgccgctggccttcacacagaagaccatcgaccgcttggcgggtaaacccacccatgtcaatgtgtctgttgtcatggcggaggtggacggcacctgctactgagccgcccgcctgtccccacccctgaataaactccatgctcccccaagcagccccacgcttccatccggcgcctgtctgtccatcctcagggtctcagcacttgggaaagggccagggcatggacagggaagaataccccctgccctgagcctcggggggcccctggcacccccatgagactttccaccctggtgtgagtgtgagttgtgagtgtgagagtgtgtggtgcaggagg

SEQ ID NO: 782 - DNA, 6728 bp, Homo sapiens
agcagacgggagtttctcctcggggtcggagcaggaggcacgcggagtgtgaggccacgcatgagcggacgctaaccccctccccagccacaaagagtctacatgtctagggtctagacatgttcagctttgtggacctccggctcctgctcctcttagcggccaccgccctcctgacgcacggccaagaggaaggccaagtcgagggccaagacgaagacatcccaccaatcacctgcgtacagaacggcctcaggtaccatgaccgagacgtgtggaaacccgagccctgccggatctgcgtctgcgacaacggcaaggtgttgtgcgatgacgtgatctgtgacgagaccaagaactgccccggcgccgaagtccccgagggcgagtgctgtcccgtctgccccgacggctcagagtcacccaccgaccaagaaaccaccggcgtcgagggacccaagggagacactggcccccgaggcccaaggggacccgcaggcccccctggccgagatggcatccctggacagcctggacttcccggaccccccggaccccccggacctcccggaccccctggcctcggaggaaactttgctccccagctgtcttatggctatgatgagaaatcaaccggaggaatttccgtgcctggccccatgggtccctctggtcctcgtggtctccctggcccccctggtgcacctggtccccaaggcttccaaggtccccctggtgagcctggcgagcctggagcttcaggtcccatgggtccccgaggtcccccaggtccccctggaaagaatggagatgatggggaagctggaaaacctggtcgtcctggtgagcgtgggcctcctgggcctcagggtgctcgaggattgcccggaacagctggcctccctggaatgaagggacacagaggtttcagtggtttggatggtgccaagggagatgctggtcctgctggtcctaagggtgagcctggcagccctggtgaaaatggagctcctggtcagatgggcccccgtggcctgcctggtgagagaggtcgccctggagcccctggccctgctggtgctcgtggaaatgatggtgctactggtgctgccgggccccctggtcccaccggccccgctggtcctcctggcttccctggtgctgttggtgctaagggtgaagctggtccccaagggccccgaggctctgaaggtccccagggtgtgcgtggtgagcctggcccccctggccctgctggtgctgctggccctgctggaaaccctggtgctgatggacagcctggtgctaaaggtgccaatggtgctcctggtattgctggtgctcctggcttccctggtgcccgaggcccctctggaccccagggccccggcggccctcctggtcccaagggtaacagcggtgaacctggtgctcctggcagcaaaggagacactggtgctaagggagagcctggccctgttggtgttcaaggaccccctggccctgctggagaggaaggaaagcgaggagctcgaggtgaacccggacccactggcctgcccggaccccctggcgagcgtggtggacctggtagccgtggtttccctggcgcagatggtgttgctggtcccaagggtcccgctggtgaacgtggttctcctggccccgctggccccaaaggatctcctggtgaagctggtcgtcccggtgaagctggtctgcctggtgccaagggtctgactggaagccctggcagccctggtcctgatggcaaaactggcccccctggtcccgccggtcaagatggtcgccccggacccccaggcccacctggtgcccgtggtcaggctggtgtgatgggattccctggacctaaaggtgctgctggagagcccggcaaggctggagagcgaggtgttcccggaccccctggcgctgtcggtcctgctggcaaagatggagaggctggagctcagggaccccctggccctgctggtcccgctggcgagagaggtgaacaaggccctgctggctcccccggattccagggtctccctggtcctgctggtcctccaggtgaagcaggcaaacctggtgaacagggtgttcctggagaccttggcgcccctggcccctctggagcaagaggcgagagaggtttccctggcgagcgtggtgtgcaaggtccccctggtcctgctggaccccgaggggccaacggtgctcccggcaacgatggtgctaagggtgatgctggtgcccctggagctcccggtagccagggcgcccctggccttcagggaatgcctggtgaacgtggtgcagctggtcttccagggcctaagggtgacagaggtgatgctggtcccaaaggtgctgatggctctcctggcaaagatggcgtccgtggtctgaccggccccattggtcctcctggccctgctggtgcccctggtgacaagggtgaaagtggtcccagcggccctgctggtcccactggagctcgtggtgcccccggagaccgtggtgagcctggtccccccggccctgctggctttgctggcccccctggtgctgacggccaacctggtgctaaaggcgaacctggtgatgctggtgccaaaggcgatgctggtccccctgggcctgccggacccgctggaccccctggccccattggtaatgttggtgctcctggagccaaaggtgctcgcggcagcgctggtccccctggtgctactggtttccctggtgctgctggccgagtcggtcctcctggcccctctggaaatgctggaccccctggccctcctggtcctgctggcaaagaaggcggcaaaggtccccgtggtgagactggccctgctggacgtcctggtgaagttggtccccctggtccccctggccctgctggcgagaaaggatcccctggtgctgatggtcctgctggtgctcctggtactcccgggcctcaaggtattgctggacagcgtggtgtggtcggcctgcctggtcagagaggagagagaggcttccctggtcttcctggcccctctggtgaacctggcaaacaaggtccctctggagcaagtggtgaacgtggtccccccggtcccatgggcccccctggattggctggaccccctggtgaatctggacgtgagggggctcctgctgccgaaggttcccctggacgagacggttctcctggcgccaagggtgaccgtggtgagaccggccccgctggaccccctggtgctcctggtgctcctggtgcccctggccccgttggccctgctggcaagagtggtgatcgtggtgagactggtcctgctggtcccgccggtcccgtcggccccgtcggcgcccgtggccccgccggaccccaaggcccccgtggtgacaagggtgagacaggcgaacagggcgacagaggcataaagggtcaccgtggcttctctggcctccagggtccccctggccctcctggctctcctggtgaacaaggtccctctggagcctctggtcctgctggtccccgaggtccccctggctctgctggtgctcctggcaaagatggactcaacggtctccctggccccattgggccccctggtcctcgcggtcgcactggtgatgctggtcctgttggtccccccggccctcctggacctcctggtccccctggtcctcccagcgctggtttcgacttcagcttcctgccccagccacctcaagagaaggctcacgatggtggccgctactaccgggctgatgatgccaatgtggttcgtgaccgtgacctcgaggtggacaccaccctcaagagcctgagccagcagatcgagaacatccggagcccagagggaagccgcaagaaccccgcccgcacctgccgtgacctcaagatgtgccactctgactggaagagtggagagtactggattgaccccaaccaaggctgcaacctggatgccatcaaagtcttctgcaacatggagactggtgagacctgcgtgtaccccactcagcccagtgtggcccagaagaactggtacatcagcaagaaccccaaggacaagaggcatgtctggttcggcgagagcatgaccgatggattccagttcgagtatggcggccagggctccgaccctgccgatgtggccatccagctgaccttcctgcgcctgatgtccaccgaggcctcccagaacatcacctaccactgcaagaacagcgtggcctacatggaccagcagactggcaacctcaagaaggccctgctcctcaagggctccaacgagatcgagatccgcgccgagggcaacagccgcttcacctacagcgtcactgtcgatggctgcacgagtcacaccggagcctggggcaagacagtgattgaatacaaaaccaccaagtcctcccgcctgcccatcatcgatgtggcccccttggacgttggtgccccagaccaggaattcggcttcgacgttggccctgtctgcttcctgtaaactccctccatcccaacctggctccctcccacccaaccaactttccccccaacccggaaacagacaagcaacccaaactgaacccccccaaaagccaaaaaatgggagacaatttcacatggactttggaaaatatttttttcctttgcattcatctctcaaacttagtttttatctttgaccaaccgaacatgaccaaaaaccaaaagtgcattcaaccttaccaaaaaaaaaaaaaaaaaaaaaagaataaataaataagtttttaaaaaaggaagcttggtccacttgcttgaagacccatgcgggggtaagtccctttctgcccgttgggttatgaaaccccaatgctgccctttctgctcctttctccacaccccccttggcctcccctccactccttcccaaatctgtctccccagaagacacaggaaacaatgtattgtctgcccagcaatcaaaggcaatgctcaaacacccaagtggcccccaccctcagcccgctcctgcccgcccagcacccccaggccctggggacctggggttctcagactgccaaagaagccttgccatctggcgctcccatggctcttgcaacatctccccttcgtttttgagggggtcatgccgggggagccaccagcccctcactgggttcggaggagagtcaggaagggccacgacaaagcagaaacatcggatttggggaacgcgtgtcatcccttgtgccgcaggctgggcgggagagactgttctgttctgttccttgtgtaactgtgttgctgaaagactacctcgttcttgtcttgatgtgtcaccggggcaactgcctgggggcggggatgggggcagggtggaagcggctccccatttttataccaaaggtgctacatctatgtgatgggtggggtggggagggaatcactggtgctatagaaattgagatgcccccccaggccagcaaatgttcctttttgttcaaagtctatttttattccttgatattttttctttctttttttttttttttgtggatggggacttgtgaatttttctaaaggtgctatttaacatgggaggagagcgtgtgcgctccagcccagcccgctgctcactttccaccctctctccacctgcctctggcttctcaggcctctgctctccgacctctctcctctgaaaccctcctccacagctgcagcccatcctcccggctccctcctagtctgtcctgcgtcctctgtccccgggtttcagagacaacttcccaaagcacaaagcagtttttccctaggggtgggaggaagcaaaagactctgtacctattttgtatgtgtataataatttgagatgtttttaattattttgattgctggaataaagcatgtggaaatgacccaaacataatccgcagtggcctcctaatttccttctttggagttgggggaggggtagacatggggaaggggccttggggtgatgggcttgccttccattcctgccctttccctccccactattctcttctagatccctccataaccccactcccctttctctcacccttcttataccgcaaacctttctacttcctctttcattttctattcttgcaatttccttgcaccttttccaaatcctcttctcccctgcaataccatacaggcaatccacgtgcacaacacacacacacactcttcacatctggggttgtccaaacctcatacccactccccttcaagcccatccactctccaccccctggatgccctgcacttggtggcggtgggatgctcatggatactgggagggtgaggggagtggaacccgtgaggaggacctgggggcctctccttgaactgacatgaagggtcatctggcctctgctcccttctcacccacgctgacctcctgccgaaggagcaacgcaacaggagaggggtctgctgagcctggcgagggtctgggagggaccaggaggaaggcgtgctccctgctcgctgtcctggccctgggggagtgagggagacagacacctgggagagctgtggggaaggcactcgcaccgtgctcttgggaaggaaggagacctggccctgctcaccacggactgggtgcctcgacctcctgaatccccagaacacaacccccctgggctggggtggtctggggaaccatcgtgcccccgcctcccgcctactcctttttaagctt

SEQ ID NO: 783 - DNA, 1089 bp, Homo sapiens
  misc_feature: n=a,t,g or c
cctggacctcctgtgcaagaacatgaaacanctgtggttcttccttctcctggtggcagctcccagatgggtcctgtcccaggtgcacctgcaggagtcgggcccaggactggggaagcctccagagctcaaaaccccacttggtgacacaactcacacatgcccacggtgcccagagcccaaatcttgtgacacacctcccccgtgcccacggtgcccagagcccaaatcttgtgacacacctcccccatgcccacggtgcccagagcccaaatcttgtgacacacctcccccgtgcccnnngtgcccagcacctgaactcttgggaggaccgtcagtcttcctcttccccccaaaacccaaggatacccttatgatttcccggacccctgaggtcacgtgcgtggtggtggacgtgagccacgaagacccnnnngtccagttcaagtggtacgtggacggcgtggaggtgcataatgccaagacaaagctgcgggaggagcagtacaacagcacgttccgtgtggtcagcgtcctcaccgtcctgcaccaggactggctgaacggcaaggagtacaagtgcaaggtctccaacaaagccctcccagcccccatcgagaaaaccatctccaaagccaaaggacagcccnnnnnnnnnnnnnnnnnnnnnnnnnnnnnnnnnnnngaggagatgaccaagaaccaagtcagcctgacctgcctggtcaaaggcttctaccccagcgacatcgccgtggagtgggagagcaatgggcagccggagaacaactacaacaccacgcctcccatgctggactccgacggctccttcttcctctacagcaagctcaccgtggacaagagcaggtggcagcaggggaacatcttctcatgctccgtgatgcatgaggctctgcacaaccgctacacgcagaagagcctctccctgtctccgggtaaatgagtgccatggccggcaagcccccgctccccgggctctcggggtcgcgcgaggatgcttggcacgtaccccgtgtacatacttcccaggcacccagcatggaaataaagcacccagcgctgccctgg

SEQ ID NO: 784 - DNA, 148 bp, Homo sapiens
gttttgcaaccacccatcaataaactttcttttttattattaagtgggggcagggtttctgttcttgcaactgagtcctaacagaaaacaatggtttcgctgaccacacggagagctgaggacaggacaaaaaggcatgagacagctg

SEQ ID NO: 785 - DNA, 390 bp, Homo sapiens
  misc_feature: n=a,t,g or c
atcttanttaaaacctttttnacaatttattncctgttgnnaanctttaaaaatgaggtnctagctaagtgcagggtttcagtggtgaaattttgaccatgtgaacacataaataaatatttacagtctttggcaaaacacatgacgtttcatcaacctatacgataaatttgtttagaaaancataaataatttacaaaaaatatggtacattctaaatattcacatcatcgtcactcccacaccattgtacggttgaccccacaacacagaaacaggaaaacctgcacgctgttgacagtcgctacatttnatgaggtatcccaacgcttcgttggtctcggggantacaggctccacaggcaaaaaggtaaaaagtgcaggcaaanc

SEQ ID NO: 786 - DNA, 5416 bp, Homo sapiens
gtgtcccatagtgtttccaaacttggaaagggcgggggagggcgggaggatgcggagggcggaggtatgcagacaacgagtcagagtttccccttgaaagcctcaaaagtgtccacgtcctcaaaaagaatggaaccaatttaagaagccagccccgtggccacgtcccttcccccattcgggccctcctctgcgcccccgcaggctcctcccagctgtggctgcccgggcccccagccccagccctcccattggtggaggcccttttggaggcaccctagggccagggaaacttttgccgtataaatagggcagatccgggatttgttattttagcaccacggcagcaggaggtttcggctaagttggaggtactggccacgactgcatgcccgcgcccgccatgtgatacctccgccggtgacccagggctctgcgacacaaggagtcgcatgtctaagtgctagacatgctcagctttgtggatacgcggactttgttgctgcttgcagtaaccttatgcctagcaacatgccaatctttacaagaggaaactgtaagaaagggcccagccggagatagaggaccacgtggagaaaggggtccaccaggccccccaggcagagatggtgaagatggtcccacaggccctcctggtccacctggtcctcctggcccccctggtctcggtgggaactttgctgctcagtatgatggaaaaggagttggacttggccctggaccaatgggcttaatgggacctagaggcccacctggtgcagctggagccccaggccctcaaggtttccaaggacctgctggtgagcctggtgaacctggtcaaactggtcctgcaggtgctcgtggtccagctggccctcctggcaaggctggtgaagatggtcaccctggaaaacccggacgacctggtgagagaggagttgttggaccacagggtgctcgtggtttccctggaactcctggacttcctggcttcaaaggcattaggggacacaatggtctggatggattgaagggacagcccggtgctcctggtgtgaagggtgaacctggtgcccctggtgaaaatggaactccaggtcaaacaggagcccgtggtcttcctggtgagagaggacgtgttggtgcccctggtccagctggtgcccgtggaagtgatggaagtgtgggtcccgtaggtcctgctggtcctaatgggtctgctggccctccaggtttcccaggtgcccctggtcccaagggtgaaattggagctgttggtaacgctggtcctactggacccgccggtccccgtggtgaagtgggtcttccaggcctctccggccccgttggacctcctggtaatcctggagcaaacggccttactggtgccaagggtgctgctggccttcccggcgttgctggggctcccggcctccctggaccccgcggtattcctggccctcctggtgctgccggtactactggtgccagaggacttgttggtgagcctggtccagctggctccaaaggagagagcggtaacaagggtgagcccggctccgctggtccccaaggtcctcctggtcccagtggtgaagaaggaaagagaggccctaatggggaagctggatctgccggccctccaggacctcctgggctgagaggtagtcctggttctcgtggtcttcctggagctgatggcagagctggcgtcatgggccctcctggtagtcgtggtgcaagtggccctgctggagtccgaggacctaatggagatgctggtcgccctggggagcctggtctcatgggacccagaggtcttcctggttcccctggaaatatcggccccgctggaaaagaaggtcctgtcggcctccctggcatcgacggcaggcctggcccaattggccccgttggagcaagaggagagcctggcaacattggattccctggacccaaaggccccactggtgaccctggcaaaaacggtgataaaggtcatgctggtcttgctggtgctcggggtgctccaggtcctgatggaaacaatggtgctcagggacctcctggaccacagggtgttcaaggtggaaaaggtgaacagggtcccgctggtcctccaggcttccagggtctgcctggcccctcaggtcccgctggtgaagttggcaaaccaggagaaaggggtctccatggtgagtttggtctccctggtcctgctggtccaagaggggaacgcggtcccccaggtgagagtggtgctgccggtcctactggtcctattggaagccgaggtccttctggacccccagggcctgatggaaacaagggtgaacctggtgtggttggtgctgtgggcactgctggtccatctggtcctagtggactcccaggagagaggggtgctgctggcatacctggaggcaagggagaaaagggtgaacctggtctcagaggtgaaattggtaaccctggcagagatggtgctcgtggtgctcatggtgctgtaggtgcccctggtcctgctggagccacaggtgaccggggcgaagctggggctgctggtcctgctggtcctgctggtcctcggggaagccctggtgaacgtggcgaggtcggtcctgctggccccaacggatttgctggtccggctggtgctgctggtcaaccgggtgctaaaggagaaagaggaggcaaagggcctaagggtgaaaacggtgttgttggtcccacaggccccgttggagctgctggcccagctggtccaaatggtccccccggtcctgctggaagtcgtggtgatggaggcccccctggtatgactggtttccctggtgctgctggacggactggtcccccaggaccctctggtatttctggccctcctggtccccctggtcctgctgggaaagaagggcttcgtggtcctcgtggtgaccaaggtccagttggccgaactggagaagtaggtgcagttggtccccctggcttcgctggtgagaagggtccctctggagaggctggtactgctggacctcctggcactccaggtcctcagggtcttcttggtgctcctggtattctgggtctccctggctcgagaggtgaacgtggtctacctggtgttgctggtgctgtgggtgaacctggtcctcttggcattgccggccctcctggggcccgtggtcctcctggtgctgtgggtagtcctggagtcaacggtgctcctggtgaagctggtcgtgatggcaaccctgggaacgatggtcccccaggtcgcgatggtcaacccggacacaagggagagcgcggttaccctggcaatattggtcccgttggtgctgcaggtgcacctggtcctcatggccccgtgggtcctgctggcaaacatggaaaccgtggtgaaactggtccttctggtcctgttggtcctgctggtgctgttggcccaagaggtcctagtggcccacaaggcattcgtggcgataagggagagcccggtgaaaaggggcccagaggtcttcctggcttcaagggacacaatggattgcaaggtctgcctggtatcgctggtcaccatggtgatcaaggtgctcctggctccgtgggtcctgctggtcctaggggccctgctggtccttctggccctgctggaaaagatggtcgcactggacatcctggtacggttggacctgctggcattcgaggccctcagggtcaccaaggccctgctggcccccctggtccccctggccctcctggacctccaggtgtaagcggtggtggttatgactttggttacgatggagacttctacagggctgaccagcctcgctcagcaccttctctcagacccaaggactatgaagttgatgctactctgaagtctctcaacaaccagattgagacccttcttactcctgaaggctctagaaagaacccagctcgcacatgccgtgacttgagactcagccacccagagtggagcagcggttactactggattgaccccaaccaaggatgcactatggaagccatcaaagtatactgtgatttccctaccggcgaaacctgtatccgggcccaacctgaaaacatcccagccaagaactggtataggagctccaaggacaagaaacacgtctggctaggagaaactatcaatgctggcagccagtttgaatataatgttgaaggagtgacttccaaggaaatggctacccaacttgccttcatgcgcctgctggccaactatgcctctcagaacatcacctaccactgcaagaacagcattgcatacatggatgaggagactggcaacctgaaaaaggctgtcattctacagggctctaatgatgttgaacttgttgctgagggcaacagcaggttcacttacactgttcttgtagatggctgctctaaaaagacaaatgaatggggaaagacaatcattgaatacaaaacaaataagccatcacgcctgcccttccttgatattgcacctttggacatcggtggtgctgaccatgaattctttgtggacattggcccagtctgtttcaaataaatgaactcaatctaaattaaaaaagaaagaaatttgaaaaaactttctctttgccatttcttcttcttcttttttaactgaaagctgaatccttccatttcttctgcacatctacttgcttaaattgtgggcaaaagagaaaaagaaggattgatcagagcattgtgcaatacagtttcattaactccttcccccgctcccccaaaaatttgaatttttttttcaacactcttacacctgttatggaaaatgtcaacctttgtaagaaaaccaaaataaaaattgaaaaataaaaaccataaacatttgcaccacttgtggcttttgaatatcttccacagagggaagtttaaaacccaaacttccaaaggtttaaactacctcaaaacactttcccatgagtgtgatccacattgttaggtgctgacctagacagagatgaactgaggtccttgttttgttttgttcataatacaaaggtgctaattaatagtatttcagatacttgaagaatgttgatggtgctagaagaatttgagaagaaatactcctgtattgagttgtatcgtgtggtgtattttttaaaaaatttgatttagcattcatattttccatcttattcccaattaaaagtatgcagattatttgcccaaagttgtcctcttcttcagattcagcatttgttctttgccagtctcattttcatcttcttccatggttccacagaagctttgtttcttgggcaagcagaaaaattaaattgtacctattttgtatatgtgagatgtttaaataaattgtgaaaaaaatgaaataaagcatgtttggttttccaaaagaacatat

SEQ ID NO: 787 - DNA, 272 bp, Homo sapiens
tttttgcaaatataagaagtaattttattgcaatatactgtggctagagtggtctggggagaacgggacacattttgaagttcagtacaaattataacaactttgaagggaccacagaggaagaaaatgacaggagaaaaggacaaattggatgggatgagaaatgaaaacagaatcacatgacctagacgcagccacgggggtcgcgggacagtcctcggctatggcttttcttttgaagagatgaaggtgacagtcattggcacatgcta

SEQ ID NO: 788 - DNA, 915 bp, Homo sapiens
ctgatttgcatggatggactctccccctctcagagtatgaagagagggagagatctgggggaagctcagcttcagctgtgggtagagaagacaggactcaggacaatctccagcatggccagcttccctctcctcctcaccctcctcactcactgtgcagggtcctgggcccagtctgtgctgactcagccaccctcagcgtctgggacccccgggcagagggtcaccatctcttgttctggaagccgctccaacgtcggaagtaataatgttaactggtaccagcagctcccaggaacggcccccaaactcctcatctatagtaataatcagcggccctcaggggtccctgaccgattctctggctccaagtctggcacctcagcctccctggccatcagtgggctccagtctgaggatgaggctgattattactgtgcaacatgggatgacagtactgtggtcttcggcggagggaccaagctgaccgtccctggtcagcccaaggctgccccctcggtcactctgttcccgccctcctctgaggagcttcaagccaacaaggccacactggtgtgtctcataagtgacttctacccgggagccgtgacagtggcctggaaggcagatagcagccccgtcaaggcgggagtggagaccaccacaccctccaaacaaagcaacaacaagtacgcggccagcagctatctgagcctgacgcctgagcagtggaagtcccacagaagctacagctgccaggtcacgcatgaagggagcaccgtggagaagacagtggcccctacagaatgttcataggttctcaaccctcaccccccaccacgggagactagagctgcaggatcccaggggaggggtctctcctcccaccccaaggcatcaagcccttctccctgc

SEQ ID NO: 789 - DNA, 1599 bp, Homo sapiens
tctaaagaagcccctgggagcacagctcatcaccatggactggacctggaggttcctctttgtggtggcagcagctacaggtgtccagtcccagatgcaggtggtgcagtctggggctgaagtaaagaagcctgggtcctcggtgacggtctcctgcaaggcatctggaggcaccttcagcaactatgctatcagctgggtgcgacaggcccctggacaagggcttgagtggatgggagggatcatccctctttttggtacaccaacctactcacagaacttccagggcagagtcacgattaccgcggacaaatccaccagcacagcccacatggagctgatcagcctgagatctgaggacacggccgtgtattactgtgcgacagatcgctacaggcaggcaaattttgaccgggcccgggttggctggttcgacccctggggccagggcaccctggtcaccgtctcctcagcctccaccaagggcccatcggtcttccccctggcaccctcctccaagagcacctctgggggcacagcggccctgggctgcctggtcaaggactacttccccgaaccggtgacggtgtcgtggaactcaggcgccctgaccagcggcgtgcacaccttcccggctgtcctacagtcctcaggactctactccctcagcagcgtggtgaccgtgccctccagcagcttgggcacccagacctacatctgcaacgtgaatcacaagcccagcaacaccaaggtggacaagaaagttgagcccaaatcttgtgacaaaactcacacatgcccaccgtgcccagcacctgaactcctggggggaccgtcagtcttcctcttccccccaaaacccaaggacaccctcatgatctcccggacccctgaggtcacatgcgtggtggtggacgtgagccacgaagaccctgaggtcaagttcaactggtacgtggacggcgtggaggtgcataatgccaagacaaagccgcgggaggagcagtacaacagcacgtaccgtgtggtcagcgtcctcaccgtcctgcaccaggactggctgaatggcaaggagtacaagtgcaaggtctccaacaaagccctcccagcccccatcgagaaaaccatctccaaagccaaagggcagccccgagaaccacaggtgtacaccctgcccccatcccgggatgagctgaccaagaaccaggtcagcctgacctgcctggtcaaaggcttctatcccagcgacatcgccgtggagtgggagagcaatgggcagccggagaacaactacaagaccacgcctcccgtgctggactccgacggctccttcttcctctacagcaagctcaccgtggacaagagcaggtggcagcaggggaacgtcttctcatgctccgtgatgcatgaggctctgcacaaccactacacgcagaagagcctctccctgtctccgggtaaatgagtgcgacggccggcaagcccccgctccccgggctctcgcggtcgcacgaggatgcttggcacgtaccccgtgtacatacttcccgggcgcccagcatggaaataaagcacccagcgctgccctgggcccctgcg

SEQ ID NO: 790 - DNA, 402 bp, Homo sapiens
tttttttgattctattacttttattaaatagtgggtttccacacatggctttttaaataatccaggcaggagaagagaggagggcacacttggaactcccctccccacaatacgtgattatttacattttagtaattggacaatcccggctcaggaggaggttgcaagaatctgcaaaagttggagggagcgccccaggagaacaaacagcaagccttatttcccctagcccatcccccaaaaaaccatccatcccatcctagtgtctggtggtgtccggtggtgtccatcttccattccttcccaaattatggaagtaaggttcttctcaccagaataagagcacttgggataacagagtagggtcccctcacccaaaaaaaaaaaaaaaaaagaagaagc

SEQ ID NO: 791 - DNA, 1201 bp, Homo sapiens
agtcccagctcagagccgcaacctgcacagccatgcccgggcaagaactcaggacgctgaatggctctcagatgctcctggtgttgctggtgctctcgtggctgccgcatgggggcgccctgtctctggccgaggcgagccgcgcaagtttcccgggaccctcagagttgcacaccgaagactccagattccgagagttgcggaaacgctacgaggacctgctaaccaggctgcgggccaaccagagctgggaagattcgaacaccgacctcgtcccggcccctgcagtccggatactcacgccagaagtgcggctgggatccggcggccacctgcacctgcgtatctctcgggccgcccttcccgaggggctccccgaggcctcccgccttcaccgggctctgttccggctgtccccgacggcgtcaaggtcgtgggacgtgacacgacctctgcggcgtcagctcagccttgcaagaccccaggcgcccgcgctgcacctgcgactgtcgccgccgccgtcgcagtcggaccaactgctggcagaatcttcgtccgcacggccccagctggagttgcacttgcggccgcaagccgccagggggcgccgcagagcgcgtgcgcgcaacggggaccactgtccgctcgggcccgggcgttgctgccgtctgcacacggtccgcgcgtcgctggaagacctgggctgggccgattgggtgctgtcgccacgggaggtgcaagtgaccatgtgcatcggcgcgtgcccgagccagttccgggcggcaaacatgcacgcgcagatcaagacgagcctgcaccgcctgaagcccgacacggtgccagcgccctgctgcgtgcccgccagctacaatcccatggtgctcattcaaaagaccgacaccggggtgtcgctccagacctatgatgacttgttagccaaagactgccactgcatatgagcagtcctggtccttccactgtgcacctgcgcgggggaggcgacctcagttgtcctgccctgtggaatgggctcaaggttcctgagacacccgattcctgcccaaacagctgtatttatataagtctgttatttattattaatttattggggtgaccttcttggggactcgggggctggtctgatggaactgtgtatttatttaaaactctggtgataaaaataaagctgtctgaactgttc

SEQ ID NO: 792 - DNA, 412 bp, Homo sapiens
tttttttttttggagaaaacagaacacccccaaaacatttattttttttttagaaaatcatggctcactatggtagtatacaatattgttttcacacatgtacacttgaaaccaaatttctaaaacttgtttttcttaaaaaatagttgttgtaacattaaaccataacctaatcagtgtgttcactatgcttccacactagccagtcttctcacacttcttctggtttcaagtctcaaggcctgacagacagaagggcttggagattttttttctttacaattcagtcttcagcaacttgagagctttcttcatgttgtcaagcaacagagctgtatctgcaggttcgtaagcatagagacgatttgaatatcttccagtgatatcggctctaactgtcagagatgggtca

SEQ ID NO: 793 - DNA, 370 bp, Homo sapiens
  misc_feature: n=a,t,g or c
gggtgctttatttccatgctgggcgcccgggaagtatgtacacggggtacgtgccaagcatcctcgcgcgaccccgagagcccggggagcgggngcttgccggccgtcgcactcatttacccggagacagggagaggctcttctgcgtgaagcggttgtgcagagcctcatgcatcacggagcatgagaagatgttcccctgctgccacctgctcttgtccacggtgagcttgctgtagaggaagaaggagccgtcggagtncagcatggggaggcntgggtnttgtagttnttctccggctgcccgctgctttcccantccacgggcgatgtcgctgggggtagaagcctttgaacagggaagtcaggc

SEQ ID NO: 794 - DNA, 313 bp, Homo sapiens
  misc_feature: n=a,t,g or c
cgttaccatcgtccgtgcgcaccgcccggcgtccagatttggcaattnttcgctgaagtcatcatgagctttttccaactcctgatgaaaaggaaggaactcattcccttggtggtgttcatgactgtggcggcgggtggagcctcatctttcgctgtgtattctctttggaaaaccgatgtgatccttgatcgaaaaaaaaatccagaaccttgggaaactgtggaccctactgtacctcaaaagcttataacaatcaaccaacaatggaaacccattgaagagttgcaaaatgtccaaagggtgaccaaat

SEQ ID NO: 795 - DNA, 445 bp, Homo sapiens
ttttttttttgtttacttatttatttattttcaccaccaacattattagccatgcctttctgctaatcgattttagcaagtcgaggtaaaacacatgcaacattttctggcaaaagcttaatgtcaaacaatatgtgatccatactgtgtgtcgtccttgggggtttatttgactttgtcacaatgacagccaacagtgagactgataagcctgtaaaaataaaaaaataagactaatcaaatagacatggcattttaatctcaaagtgcaaaatcatctaactgaaaatgacggcattgaaaaattccagtggttaaaaatgaatcaaaacttcattacgcaggcagtggaagtgtgttgaaagatttaccaggggtgtcaagttttagacactcagaaaggcaccattctagccatcttgattggataacatggtatatactt

SEQ ID NO: 796 - DNA, 434 bp, Homo sapiens
ttttttttttaagttgaacagaacattttatttctcagcaattctatgcgtacaaattaaacatgagatgaatagagactttattgagaaagcaagagaaaattcctatcaaccccaaggaggactcaaagtgaggctggaagaggacttagaagagtatgaaagtactctaagattttatctaagttgccttttctgggtgggaaagtttaaccttagtgactaaggacatcacatatgaagaatgtttaagttggaggtggcaacgtgaattgcaaacagggcctgcttcagtgactgtgtgcctgtagtcccagctactcgggagtctgtgtgaggccaggggtgccagcgcaccagctagatgctctgtaacttctaggccccattttcccctctgaaaataagagggttggatcaaacgatctctgggg

SEQ ID NO: 797 - DNA, 374 bp, Homo sapiens
gagaggtctgctactttattttgataatgcagggatattatttatctttgcagaatcaggtgactcccaacgttcccggaatcttctagtggtctgtgtcaggggtctgggctggctggggttcagtgatgtctactggaggcagcttccatgccttctggggtcctgagtctccatggcttgtggggtctgggtcccccctggattagtggatggccagagtggcatagacactgggctcagctggagaggccccttcctgggatggaggaggctcagttgccttctgtctgaagggtaaaagctgtgcagctgggcgtaggtcacatcctggggggcttcagatgcagcagcctcagtgtccatctgtctgt

SEQ ID NO: 798 - DNA, 443 bp, Homo sapiens
ctgattacctacaatggtcaattttattacaaagaactgtatcaaaatatacaagtctgtttaagaacaaccaagaaatgcagctgtttaagggacaaatgagaatcaaccgttagagagcaggcagcctctccccgccgctgtccactgcaggagacggcatcctcagggccacattttccacgggacatccttctgaataatttaaagggtaagtccggcacattacaggtcttcgcgggagggcagctgtgtcgggctttctccttctgtggcttcagctcttgccggcggacaacaggcatcttccgtttcttcgaagccgtcagacacacacagacgtagctccctggagtattgtagcagttttcgtttttcctcacacaggttttttctgctagtgagcactcgtccacatctgcacactgtccgtgctccctcgc

SEQ ID NO: 799 - DNA, 471 bp, Homo sapiens
  misc_feature: n=a,t,g or c
tttctattttatttattttattttttatttccttccctcataccttgcccattccctctgaatattaggtgtgatgtcaacagcatgttagaaggatcaatgggaaggcaatgattgaaaacatttcaatgaaccttaatagtgttcctttgaggagcacccaggagaatatctggtcatagatctttttttaaatgcagttttataaaaccctaacagcggtgatatcattagactgtatgaatcagttttattacctagtgtacaagtgtcagtcatgtatcattatatagtctgttgatctttccatttgcaaaanattaatagttttcccccacanatgtacaaagttggtatgcttccagtcttcctttaatggtttatagtcattcccaaaggtaacattccaattttacactttcacatacattggttaaggaatcantggggtttttccccctttttncccct

SEQ ID NO: 800 - DNA, 154 bp, Homo sapiens; identical to SEQ ID NO: 774

SEQ ID NO: 801 - DNA, 187 bp, Homo sapiens
  misc_feature: n=a,t,g or c
ttattgagggtttattgagtgcagggagaagggtcttgatgccttggggtgggaggagagacccctccccgggatcctgcagtctctagtctcccgtggtggggggtgagggatgagaacccatgaacattctgtaggggccactntcttctccacggtgctcccttcatgtcgtgacctgggcagc

SEQ ID NO: 802 - DNA, 3308 bp, Homo sapiens
ggcggccgcgctcgtcggggccgggggcggggccgatccctccggcttcccgcttcccgcggagaacaacaatgaaagtgaaagaggggtggggcgggggcgagcccgggttctgtggcccatttgccctgtggccttgagcaagcccctcccccaggcctcgggggctctcccggtttgggggaaccgggcgaggcaatgccacaggcccagggttagagggggtgggcacttgcagctgccgatgtggctggatctggaacttctcggagacggctcctgtcagcgccaagtttcaccaaatccaggcctgcccctcctcccccaggacccccactcgcagtccctcaagcctgtgctcccggaaaggcactgggcgaccgcacccgtggctttctctgggcgaccgggtcccagactccccccagcacagcagagcgcttccctgcccaccccggaaaccgccccaggtggccgcgccccctccccagcagccagcagggcgccagggctgagccggccgtggaggggagcgggtcccgcggttatacaggcgccggggctccgcggcaggcaagagaagctgaggcctgagaacggcccaaaccttggcgtacggcaggggacgacctgggatgggggcagcgggcggcggcgcagggagtgggccgggggccggtgtgcgcgggcgggacggggcccggggtcgggagacaccgcttggaagatggggccgggagaggcgccgtcgcagcgcagagggcaccggcggggagacgcgaggacgcggggcccgggaacacggacgccggagtagaagcgcggggggccgggctggagcgggggcggggacgcgggggtcgggggcggtgcgggtttgaggggagggggcgggcgggtccttccctgggggggtggggagagggggcgggggcccatgtgaccggctcagaccgttctggagacaaaaggggccgcggcggccggagcgggacgggcccggcgcgggagggagcgaagcagcgcgggcagcgagcgagtgagcgcgcggcgggcccctggtccgccggcccgcggccgatctaggggctgggggctggaggcggggtgggggtctgagctgcgtcctgggctcgaggcgtcccccgggggagtcgcctcttagcggtgcgtccgggctagcggcgaggggccgccccaagtcttcccaccgccgccaccttagcagcccgacttggggcctggaaagtggagcacgcggaggtgggagggccctgcacgcggccccggtgggaaaggggacgggccagggattcagactcgggctctcccctcaggatgcagcaccgaggcttcctcctcctcaccctcctcgccctactggcgctcacctccgcggtcgccaaaaagaaaggtgatgggggatgatcgaaggagggctggggacgggcaggcaggcccctccacttctggctggccgcctggttcctagcctggaacccaggaaggcggctcccgagggagtctccccgtgccccagtcctgaactctgttcctcgcgcgtgtagataaggtgaagaagggcggcccggggagcgagtgcgctgagtgggcctgggggccctgcacccccagcagcaaggattgcggcgtgggtttccgcgagggcacctgcggggcccagacccagcgcatccggtgcagggtgccctgcaactggaagaaggagtttggaggtaggcgggcgcagtcagagggcagagacgggggcacagcctcgccgaagcctgggcggacccttggcggagggcggggccgcgggcgcgcagcgctgacctgggccgctctctcgccagccgactgcaagtacaagtttgagaactggggtgcgtgtgatgggggcacaggcaccaaagtccgccaaggcaccctgaagaaggcgcgctacaatgctcagtgccaggagaccatccgcgtcaccaagccctgcacccccaagaccaaagcaaaggccaaaggtcagcgaaaggagaagggggtggggctgtcgcggggggctgcccccccccccccgcctgtgaggggacaattccaagttaaaccttaagttttgagtcctggccagtggcttcctgacatcgcctcacttggcttccctgcctggaaaagtctgaagatgggcactacaagagaggccgcaggtgatgctggggacataaatcctccctggcccaaatagggaccaactcaaactactccattggagcatctggcttaggacccagggagagagtcctggaacggcttgcctttggtcagctctccagccacgggcagcatttggtcagctctgccctttctagtgttgggaggaggtcaaggcccaccctgggcctctcagctcactcgtgactcagcccagcgaggccagcagggcaggggtgaatctgcccgcttctcaggtgaggaggctgaggatgcccagggctgctgtgaccaggactaggactggaaacttgaaggttttctgatcccaagtggaaataggaagctggggatgtcccatgtccacatcacaatggctgccccatcccctgcttccgagtcagctgattggaaaccactaggggcagatcttctccttccctgatgcccgggtgtttgtggagccggcggtctgcaatgggtcagcctaactgctgatatggtattaatatttctttcttgttttacagccaagaaagggaagggaaaggactagacgccaagcctggatgccaaggagcccctggtgtcacatggggcctggccacgccctccctctcccaggcccgagatgtgacccaccagtgccttctgtctgctcgttagctttaatcaatcatgccctgccttgtccctctcactccccagccccacccctaagtgcccaaagtggggagggacaagggattctgggaagcttgagcctcccccaaagcaatgtgagtcccagagcccgcttttgttcttccccacaattccattactaagaaacacatcaaataaactgactttttccccccaataaaagctcttcttttttaatataaagccccttcccaaggagtttgctgtggaaatgtgtttgggagtgggaaggtggggagaaagaccaggctgtagggactggtgggtttcagggggcttggtggtgggtgctctccagagctcatggaaaaagcagaacaattacaacatttcttccagggcccctgaaaggtgctccccatcaagtcacctaagcctttcggtcctcatctccctca

SEQ ID NO: 803 - DNA, 445 bp, Homo sapiens
  misc_feature: n=a,t,g or c
ttctggttgtcaatgaggatatttattggggtttcatgagtgcagggagaagggctggatgacttgggatggggagagagacccctcccctgggatccctgcagctccagggtnccgtgggtngggttagagttgggaacctatgaacattctntaggggccactntcttctccacggtgctcccttcatgcgtgacctggcanctntagcttctgtgggacttccactgctcgggcgtcaggctcaggtagctgctggccgcgtacttnttgttgctctgtttggagggtttggtggtctccactcccnccttnacggggctgccatctgccttccagggcactntcacagctcccgggtagaagtcactgatcagacacactagtgtggccttgttggcttggagctcctcagagganggcgggaacagagttacagtgggga

SEQ ID NO: 804 - DNA, 1977 bp, Homo sapiens
  misc_feature: n=a,t,g or c
ttgcaccaggcactgctgcacaacaagatacgctcgccacagtccttctttgacaccacaccatcaggccgcatcctgaactgcttctccaaggacatctatgtcgccttgatgaggttctggcccctgtcaccntcancgccgctcaattacttcttcaacgccatctccactcttgtggtcatcatggccagcacgacggatcttnacttgtgggtnanntgcccctgggtngtgctcttacaccttagtgcagcgcttctatgcagccacatcacggcaactgaagcggctggaatcagtcagccgtcacctatctactcccacttttcggagacagtgactggtgccagtgtcatccgggcctacaaccgcagccgggattttgagatcatcagtgatactaaggtggatgccaaccagagaagctgctacccctacatcatctccaaccggtggctgagcatcggagtggagttcgtggggaactgcgtggtgctctttgctgcactatttgccgtcatcgggaggagcagcctgaacccggggctggtgggctttctgtgtcctactccttgcaggtgacatttgctctgaactggatgatacgaatgatgtcagatttggaatctaacatcgtggctgtggagagggtcaaggagtactccaagacagagacagaggcgccctgggtggtggaacagccgccctcccgaaggttggccccacgtggggaggtggagttccggaattattctgtgcgctaccggccgggcctagacctggtgctgagagacctgagtctgcatgtgcacggtggcgagaaggtggggatcgtgggccgcactggggctggcaagtcttccatgaccctttgcctgttccgcatcctggaggcggcaaagggtgaaatccgcattgatggcctcaatgtggcagacatcggcctccatgacctgcgctctcagctgaccatcatcccgcaggaccccatcctgttctcggggaccctgcgcatgaacctggaccccttcggcagctactcagaggaggacatttggtgggctttggagctgtcccacctgcacacgtttgtgagctcccagccggcagctgggagcttccagtgctcagagggcggggagaatctcagcgtggnccagaggagctcgtgtgccatggcccgagccctgctccgcaagagccgcatcctggttttagacgaggccacagctgccatcgacctggagactgacaacctcatccaggctaccatccgcacccagtttgatacctgcactgtcctgaccatcgcacaccggcttaacactagcatggactacaccagggtcctggtcctggacaaaggagtagtagctgagtttgattctccagccaacctcattgcagctagaggcatcttctacgggatggccagagatgctggacttgcctaaaatatatctgagatttcctcctggcctttcctggttttcatcaggaaggaaatgacaccaaatatgtccgcagaatggacttgatagcaaacactgggggcaccttaagatttttgcacctgtaaagtgccttacagggtaactgtgctgaatgctttagatgaggaaaagatccccaagtggtgaatgacacgcctaaggtcacagctagtttgagccagttagactagtcccgggtctcccgaatcccaactgagtgttatttgcacactgcactgttttcaaataacgattttatgaaatgacctctgtcctccctctgatttttcatattttctaaagtttcgtttctgttttttaataaaaagctttttccccctggaacagaagacagctgctgggtcaggccacccctaggaactcagtcctgtactctggggtgctgcctgaatccattaaaaatgggagtactgatgaaataaaactacatggtcaacagtaaaaaaaaaaaaaaaaaaaa

SEQ ID NO: 805 - DNA, 323 bp, Homo sapiens
atgtaaactatcaaatgtttatttaaatttccatttaaaatattttcaagtaaaatatgtacaaaaatggttataaaatggttgaagcaactagaagcgtgacaggtataatacatataaatacaaccaaaattcaattcaatgcaaagttgaatgacatcatattgcaccaaaatttattccatacaaaagcacatgcatcaagagtttccataagatgaaaacaaacacacttacttcatagcatcttaccacttacttacacaaatagcccataaacaccatctggcattgtgattgcagtaccagaactctccccagag

SEQ ID NO: 806 - DNA, 382 bp, Homo sapiens
ggtcagcccaagactaccccgtcggtcattctgttcctgccgtcctgtgaggagccccaagccaacaaggccacactggtgtgtctcatgaataactttatccgggaatcttgatggtgacctggaaggcagatggtaccctcatcacccagagcgtggagaagaccacgccctccaaacagagcaacaacaagtacgtggccagcagctacctgagcctgacgcccgagcagtggaggtcccgcagaagctacagctgccaggttatgcaagaagggagcaccgtggagaagtcagtggcccctgcagaatgttcataggttccagcccccaccccaccacaggggcctggagctgcaggatcccaggggaggggtctctc

SEQ ID NO: 807 - DNA, 337 bp, Homo sapiens
ttttaaaaatgtaatactgtttatttaacttcaaaaacatttcagcattctaaacatacaaaaaaataacagaacgttgcgaatcgtgtttaagtacaggaggttcttgaactttcattgatgcagtgactctttgctttgctgacaatgaagagttctatagtttgtttaaaaacaaacagtttaaaaactaccgcacttaaaaaaaaaaaatattctcatgccagctgacccccctttgtccacagctaagatggcagcagaatgctatgtcactatatacagaaacaagacaacctgaagctaaatggatgccccctgcagagtcaacaggtcc

SEQ ID NO: 808 - DNA, 159 bp, Homo sapiens
ccggtaaacccaccctgtacaacgtgtccctggtcatgtccgacacagctggcacctgctactgaccctgctggcctacccacaggctcggggcggctggcgcctgtgtgtgcatgcaaactaaccgtgcaacgggtgagatgtgactcataatagata

SEQ ID NO: 809 - DNA, 620 bp, Homo sapiens
  misc_feature: n=a,t,g or c
ctggttgacaaagagggtatttattgagggtttactgggtacanggagaagggctggatggcttgggatgcagagagagacccttcccctgggatcctgcagctccaggcccctttgggtggggtcggggctgggaacctatgaacattctgcaggggccaccgtcttctccacggtgctcccttcgtgcatgacctggcagctgtagcttctgcgggacctccactgctcgggcgtcaggctcaggtagctgctggccgcgtacttgttgttgctctgtttggagggcgtggtcatctccacgccctgggtgatgggggtaccatctgccttccaggtcaccgtcaagattcccggataaaagtcattcatgagacacaccagtgtagccttgttggcttggagctcctcagaggacggcgggaacagagtgaccgagggggtggccttggntgacttaaaacggtgagctgggtcccgctgccaaacacatgcgtcactgagttatgcttggattgaaaccccggggccancacttggggcagtccaggagccgccttgaacaggaacctgcccaccggttcctaagcttgaccgctgnttctccagggtccaggncc

SEQ ID NO: 810 - DNA, 402 bp, Homo sapiens; identical to SEQ ID NO: 296

SEQ ID NO: 811 - DNA, 531 bp, Homo sapiens; identical to SEQ ID NO: 100
  misc_feature: n=a,t,g or c

SEQ ID NO: 812 - DNA, 448 bp, Homo sapiens
  misc_feature: n=a,t,g or c
aagaagtggcccctctgcaacatgtcctcacagaaacgaaatggtgtgtagcaatcaacactagaaagtagaccttttgcaaattaatatgtccttgaccttttttgcccttttgtgggggtgaggtggggataaaaagactgtcatatcaagaactgtgacttttctttccctcaaacaatanaactcctttattatcttaatgctcccatgttaacatgtttgctgctaaattacaatgtagaattgataatggtttatagtgaactgtgctcttccctcattaaaatcccagggtgccctggtaaagatgcagatgtttcttcctgaaaacttctttttttacaaagaaaattagatgtacatgtataattcagtgtgctttgtctttctccagattaatatcggttacactgctgatgtttgtanattanacagatatttactt

SEQ ID NO: 813 - DNA, 567 bp, Homo sapiens; identical to SEQ ID NO: 104
  misc_feature: n=a,t,g or c

SEQ ID NO: 814 - DNA, 423 bp, Homo sapiens
gttcttttgaatacttaatgacagaacaaatacttggcaaactcctttgctctgctgtcatcctgtgtacccttgtcaatccatggagctggttcactgtaactagcaggccacaggaagcaaagccttggtgcctgtgagctcatctcccaggatggtgactaagtagcttagctagtgatcagctcatcctttaccataaaagtcatcattgctgtttagcttgactgttttcctcaagaacatcgatctgaaggattcataaggagcttatctgaacagatttatctaagaaaaaaaaaaaacgacataaaataagtgaaacaactaggaccaaattacagataaactagttagcttcacagcctctatggctacatggttcttctggccgatggtatgacacctaagttagaacacagc

SEQ ID NO: 815 - DNA, 440 bp, Homo sapiens
attcggaacgaggattatttcatataccttcaagccataaagatattgtgttcacttttctgcttgaggctaaggcactgtatcccaggcctcccaatgttcccgagccaggaactctgggccccatggagttatgagctcccttggaattttgagccaagctttaagcaagtctggactcctgagacctcctgggtctagtcagtaaaattctgcaactctaggaattctaagatcccattggaaggaatgctctacctcacagaactctgaaccctacagaaatatgggcctgctgccatttcctgaagaccggggcatcggggtggggtgataaaggatacaacctgcacagggggaagttattaaagaggctgcaaagtccagccaccctgaagatactccccagtgctcccctcctgctaaagaaccagttaccc

SEQ ID NO: 816 - DNA, 579 bp, Homo sapiens
cagtggatcaggacaagtggtattggacaggagatgtcgccacaatgaatgagcagggcttctgcaagatcgtgggccgctctaaggatatgatcatccggggtggtgagaacatctaccccgcagagctcgaggacttctttcacacacacccgaagtgcaggaagtgcaggtggtgggagtgaaggacgatcggatgggggaagagatttgtgcctgcattcggctgaaggacggggaggagaccacggtggaggagataaaagctttctgcaaagggaagatctctcacttcaagattccgaagtacatcgtgtttgtcacaaactaccccctcaccatttcaggaaagatccagaaattcaaacttcgagagcagatggaacgacatctaaatctgtgaataaagcagcaggcctgtcctggccggttggcttgactctctcctgtcagaatgcaacctggctttatgcacctagatgtccccagcacccagttctgagccaggcacatcaaatgtcaaggaattgactgaacgaactaagagctcctggatgggtccgggaactcgcctgggca

SEQ ID NO: 817 - DNA, 586 bp, Homo sapiens; identical to SEQ ID NO: 164

SEQ ID NO: 818 - DNA, 190 bp, Homo sapiens; identical to SEQ ID NO: 170

SEQ ID NO: 819 - DNA, 6289 bp, Homo sapiens
acgacctatggtctagtaggggttctgggggctggggcgtgtaccgctcccctagctttggagctggggaagggctcctgcggtcccaggctcgaacccgtgccaaaggacctggaggcacctctagggcattgagggatggaggatttgagcctgaaagagtcgacagcggaagtccctgtcaaatccagatatcgcctcagagaccctgacgcttctcagtttcctgcgctcagacctttcagagctgagggtccgaaaacctggtgggagctccggggaccgtggaagcaaccccctagatggcagagactcaccatccgcaggtggccctgtggggcaacttgaacccatacccatcccagccccagcatcacctggcacgcgccccacactcaaggacttgacagccactctgcggagagcaaagtcattcacctgctctgagaagcccatggcccgccgcctgccccgcaccagtgctctgaagtccagctcctccgagctcctgctcacaggccctggtgccgaggaggatccgctgcccctcatcgtccaggaccaatatgtgcaggaggcccgccaggtttttgagaagatccagcgcatgggtgcccaacaagatgatggaagcgatgccccccctggaagccctgactgggcaggggatgtgacccgagggcagcggtcccaggaggagctctcaggccctgagtccagtctgacagatgaaggcattggggcagaccctgagcctcctgttgcagcattttgcggcctgggtaccacagggatgtggcgacctctttcctcatcctcggcccagacgaaccaccatggccctgggactgaggacagtctgggcgggtgggccctggtgtcgcctgagacccctcccacaccaggtgccctccgccgacgacgcaaagtcccaccttcaggttctggtgggagcgaatttagcaatggggaggcaggggaggcctacaggtccctgagtgacccaattcctcagcgccaccgggctgccacctctgaagagcctactgggttctctgtggacagcaacctcctgggctcactgagccccaagacagggctccctgccacctcagccatggatgagggcttgaccagtggtcacagtgactggtctgtgggcagtgaagagagcaagggatatcaggaggttattcagagcatagttcaggggcctggcaccctggggcgtgtggtggacgacaggattgctggcaaagcccccaagaagaaatccctgagtgaccccagccgccgtggggagctggctgggcctggattcgagggccctggaggggagcccatccgagaagttgagcccatgctgcctccatccagcagcgagcccatccttgtagagcagcgggcagagccagaagaacctggtgccaccaggagccgggcacagtctgaaagggccctacctgaggctctgcctccccctgccactgcccaccgaaactttcaccttgaccccaagctggctgacattctgtccccgaggctaatccgccgaggctccaagaagcgcccagctcggagtagtcaccaggagcttcggagagacgagggcagtcaggaccagactggcagcctgtctcgggcccggccctcctccagacacgttcgccatgccagtgtgcccgccacatttatgcctattgtggtgcctgagccaccaacttctgttggtccccctgtggctgtgccagaacccataggcttccctacccgagcccatcccacgttgcaggcaccatcgctcgaggacgtcaccaagcagtacatgctgaacctgcactccggtgaggtccctgccccagtgccagtggacatgccctgcttgcctctggctgcaccgccctctgctgaggccaagccccctgaggcagctcggcctgcagatgagcctacccctgccagcaagtgctgcagcaagccacaggtggacatgcggaagcacgtggccatgaccctgctggacacagagcagtcgtatgtggagtcgctgcgcaccctgatgcagggctacatgcagccgctgaagcagccagagaactccgtgctctgtgacccttcactggtggacgagatcttcgaccagatccccgagctcctggagcaccacgagcaattcctggagcaggttcggcactgcatgcagacctggcatgcccagcagaaggtgggagccctgctcgtccagtcgttctccaaggatgtcctagtaaacatctattctgcctatatcgataacttcctcaatgcaaaggatgctgtgcgtgtggccaaggaggcgaggcctgcctttctcaagttcctagagcaaagcatgcgtgagaacaaggagaagcaggcgctgtctgacctcatgatcaagcctgtgcagcggatcccacgctacgagcttctggtgaaggacctcctgaagcatacacctgaggaccacccggaccatccactcctgctggaggcgcagcggaacatcaagcaggtggctgagcgcatcaacaagggtgtgcggagtgccgaggaggcggagcgccatgcccgtgtgctgcaggagatagaggctcacatcgagggcatggaggatctccaggcccctctgcggcggttcctgagacaggagatggtcattgaagtgaaggcgatcggtggcaagaaggaccggtctctcttcctgttcacggacctcatcgtctgcaccactctgaagcgaaagtcaggctccctgcggcgcagctccatgagcctgtacacggcagccagtgtcattgacacagccagcaagtacaagatgctgtggaagctgccgctggaagacgcagacatcatcaaaggggcatcccaagccaccaatcgggagaacatccagaaggccatcagccgccttgatgaggacctcaccaccctgggccaaatgagcaagctctctgagagccttggtttcccccaccagagcctggacgatgcactgcgggacctctcagctgccatgcaccgggacctgtcggagaagcaggcgctgtgctacgcgctttccttcccgccaaccaagctggagctgtgcgccactcggcccgagggcaccgactcctacatttttgagttccctcaccctgacgcccgccttggttttgaacaggccttcgatgaggccaagaggaagctggcatccagcaaaagctgtctagaccctgagttcctgaaggccatccccatcatgaaaacccgcagtggcatgcagttctcctgtgcggctcccaccctgaacagctgcccggagccctcgcctgaggtatgggtctgcaacagcgacggctacgtgggccaggtgtgcctgctgagcctgcgcgccgagccggacgtggaggcctgcatcgccgtctgttccgcccgcatcctctgcatcggggcggtgcccgggctgcagcctcgctgccaccgggagcctcctccgtcgctgaggagtcctccagagacggcaccggagcccgccgggccggagctggacgtcgaggccgctgcagacgaggaagccgcgacgctcgcggagccggggccgcagccctgccttcacatctccattgcaggctcgggcttggagatgacgccgggcctcggcgagggtgacccccgcccagagctggtgccctttgacagtgactctgacgatgagtcttcgcccagcccctcggggacgctgcagagccaggccagccggtccaccatctcctccagctttggcaatgaggagaccccgagttccaaggaggccacggcagagaccaccagctcagaggaggagcaggagccaggcttcctgccactgtctggctcctttgggcctggtggtccctgcggcaccagcccaatggatgggagagcccttcgccgctccagccacggctccttcacccggggcagccttgaggacctgctgagtgtcgaccctgaggcctaccagagctccgtgtggctgggcactgaggatggctgtgtccacgtgtaccagtcctccgacagcatccgtgaccgcaggaacagcatgaagctccagcatgcggcctctgtgacctgcatcttgtatctgaataaccaggtgtttgtgtctctggccaatggagagcttgtggtctaccaaagggaagcaggccatttctgggacccccagaacttcaaatcagtgaccttgggcacccaggggagccccatcaccaagatggtatctgtgggtgggcggctgtggtgtggctgccagaaccgagtccttgtcctgagccctgacacgctgcagctggagcacatgttttacgtgggtcaggattcaagccgctgcgtggcttgcatggtggactccagcctgggtgtgtgggtgacattgaaaggtagtgcccacgtgtgtctctaccatccagacacctttgagcagctggcagaagtagacgtcactcctcccgtgcacaggatgctggcaggctcggatgccatcatccggcagcacaaggctgcctgtctgcgaatcacagcgctgctggtgtgtgaggagctgctgtgggtgggcaccagtgctggtgtcgtcctcaccatgcccacttcgcccggtactgtcagctgcccacgggcaccactcagtcccacaggcctcggccagggacacaccggccacgtccgcttcttggctgcagtccagctgccagatggcttcaacctgctctgcccaaccccaccacctcccccagacacaggccccgagaagctgccatcactggagcaccgggactccccttggcaccgaggccccgcccctgccaggcctaaaatgctggttatcagtggaggtgatggctatgaggacttccgactcagcagtgggggcggcagcagcagtgagactgtgggtcgagacgacagcacaaaccacctcctcctgtggagggtgtgaccctgtctgccgtggcccaggactcgcccgcccacctgccttcagcctgcttgcctctccctagcccacacgcagactttgaccaggagtatccagccaggggcacacatgtgcctgcgtgggctctgccttgtcttcgcggaagcattcctgatggaacacccactggccagccaggccatggcttctcccgaccctctggctgccccggtgcttccagtcatgatcgggtgggggacatgtgggctgaccaggacctctgaccctggagcttctaccaaagacacagctgggtctggaccccacggggctggggagggccatgtgcaatatttggagggttttctggagggcagcaggaaggctggggaattccccatgtacagtatttatgtttctttttagatgtgtaccttcccaagcacttatttatgcagtgacctggtcacctggggtgggggtgatttgaggaaatgacatgaggaaaagaaacctattcctgccctggggaccaccctgggactctaaccaagccttcctggagggacccatgcgcccctgagccccattccattcatacagacacacacgtacgcacactgcatgtccaaggccctaaacattgcccgttgacataaactttccagggccccagcctgatggggctgccctcagtcctctagatcaagatgctgactattagggggcagtgattgccatctggggacctgtcaggctttgtcatttcccagtttgttggtggtgcctttagtggttccctaatttgggaacactgatggggccttggacagggctttctctcaggtaggagaaatgggcccatgatctcctcacagtcgcccccagtccttggccctgcttccctgtgtctcatgcactggcacatatggtcaccttggagggcagacctaggagcccctctgaccactgaatccgtctccacaccccttctgccaagggaagccccttcaggaaggaccccccaaagctgaggggctgaatgtagccttttcaacagagaaggctcccacttgagagcagcctctacctgaccccctggaccacagagagccactctgaccctcagccccctcgcttcttcagctaaaactccaaaggtttggtttcagatggggtttgttttgttctgtttggttttggttttgtttggggtgggtgggtcattgcggtcttagattatgtttctcttgctaccaaacagtcatgtattaactctctttggatgatgaagtttaaagagtcaataaatagaaacaccag

SEQ ID NO: 820 - DNA, 460 bp, Homo sapiens; identical to SEQ ID NO: 191

SEQ ID NO: 821 - DNA, 510 bp, Homo sapiens
  misc_feature: n=a,t,g or c
gcggcacgagggtgtcagtcaagaggcaacactaggaggcaaggaatctgcatttctttcagaccttggcagagagcgccctgggaaatgcggatatagaaggtcaggagaacatctctcctggttatacagcattccaggactcctcatctgtttttaagagggaaatctgagttttcaaggaaagccgaatacagttgccaagttgccagtcaaagaaacaatgtcaacacctgctcatagagatggaattcctaacccggaatattgcccttgaattacaacgagaaaaagaacacttcttattcctgtagcacctcttcaagtgagatgggcagaccaccttcaggatgggaaatgtatttcttcatccccctctctaatttccctgtggacctcctgcaantaaggggagaggacaaagaggaggaggcagaaggaacagaagattggagttggccaaagnggaggaggagggagtgattgaacnttgacaagattttgggttgg

SEQ ID NO: 822 - DNA, 562 bp, Homo sapiens; identical to SEQ ID NO: 216

SEQ ID NO: 823 - DNA, 2907 bp, Homo sapiens; identical to SEQ ID NO: 318

SEQ ID NO: 824 - DNA, 1071 bp, Homo sapiens
gcagttctggtcctcctaggagcggccgcctgcgcggcgcggccccgtggtcggatgctgggcggcagagaggccgaggcgcacgcgcggccctacatggcgtcggtgcagctgaacggcgcgcacctgtgcgcaggcgtcctggtggcggagcggtgggtgctgagcgcggcgcactgcctggaggacgcggccgacgggaaggtgcaggttctcctgggcgcgcactccctgtcgcagccggagccctccaagcgcctgtacgacgtgctccgcgcagtgccccacccggacagccagcccgacaccatcgaccacgacctcctgctgctacagctgtcggagaaggccacactgggccctgctgtgcgccccctgccctggcagcgcgtggaccgcgacgtggcaccgggaactctctgcgacgtggccggctggggcatagtcaaccacgcgggccgccgcccggacagcctgcagcacgtgctcttgccagtgctggaccgcgccacctgcaaccggcgcacgcaccacgacggcgccatcaccgagcgcttgatgtgcgcggagagcaatcgccgggacagctgcaagggtgactccgggggcccgctggtgtgcgggggcgtgctcgagggcgtggtcacctcgggctcgcgcgtttgcggcaaccgcaagaagcccgggatctacacccgcgtggcgagctatgcggcctggatcgacagcgtcctggcctagggtgccggggcctgaaggtcagggtcacccaagcaacaaagtcccgagcaatgaagtcatccactcctgcatctggttggtctttattgagcacctactatatgcagaaggggaggccgaggtgggaggatcattggatctcaggagttggagatcagcatgggccacgtagcgcgactccatctctacaaataaataaaaattagctgggcaattggcgggcatggaggtgggtgcttgtagttccagctactcaggaggctgaggtgggaggatgacttgaacgcaggaggctgaggctgcagtgagttgtgattgcaccactgccct

SEQ ID NO: 825 - DNA, 222 bp, Homo sapiens; identical to SEQ ID NO: 235

SEQ ID NO: 826 - DNA, 319 bp, Homo sapiens
gggagggggtattgggtaggaccatccaagaaagggcagaagaccaagggcagtcggggtctagaaaggagggcgctggccctgctgggcgcttcggagcccccactgtttcccactcagctttgtgctcagatcccaggtcccaaggagtgacaggggcttcctcccaccttctgtccttgtccagtcatgtaaataatgtgctatttctctccccgagtctttttttttaaaacctaccgtggttcctcagctaactgcattccctacccaggcagagactgtcctatgcctcgagcttccaaacgagattcagacc

SEQ ID NO: 827 - DNA, 1899 bp, Homo sapiens
tgaacctctaatagaactgtctaaccctggagccagtggatccttgttttttgtgaccagtgatgatgaatttatcatcaaaacagttcagcacaaagaagctgagtttcttcagaagctactgccaggctattacatgaatttaaaccagaatccaaggactcttttgccaaaattttacggactgtattgtatgcaatcaggaggcattaatatcaggattgtggtgatgaacaacgttttgccacgctccatgagaatgcactttacatatgacttgaaaggctcaacgtataagcgaagagcatcccgtaaagagagagagaaatccaaccccacatttaaggacttagatttcctgcaagacatgcacgaagggttgtattttgatacggaaacatacaacgcgcttatgaaaacacttcagagagactgccgggtgctagaaagcttcaagatcatggattatagccttctgttgggaattcatttcctggaccattccctcaaagagaaagaggaggagaccccacaaaatgtgcctgatgctaagcggactgggatgcagaaggttctctactcaacagccatggaatctatccagggtccagggaaatctggagatgggataatcacagagaacccagacacaatgggaggcattccagctaaaagccataggggagaaaaactacttttatttatgggcattattgacattctgcaatcatataggttaatgaagaagttagaacattcctggaaagctcttgtttatgatggggacactgtttctgttcatagaccaagcttttatgcagacagatttcttaagttcatgaattccagagttttcaagaaaattcaagctttgaaggcttcaccgtctaagaaacggtgcaattcaatcgccgccctaaaggccacttcacaggagattgtgtcctcaattagccaggaatggaaggatgagaagcgggatttgctgactgaaggacaaagttttagcagccttgatgaagaagccctgggatcccgacacaggccagacctggtccctagcactccatcactgtttgaagctgcttccttggcaaccacaatttcatcttcttccttatacgtcaatgagcactatccacacgacaggcctacactctattcaaacagtaagtgaaaatggtgatcacctaagcacatggatgagacgtgagcacagttatggcagagaagtttctccgcaccagaattatccacagcaacttggctgagccccactacacacagagaaatcatcaacctgacttaagagttttcaagatgtcaacttcaggctgatcagcagatgggatgtgaaaaatactaccctattctatcatttgctgttgcttgctgaactgtgaagaactgcatgaactatatttaagctgctttctgtaccattgccaatcacctttttggagttggaagtgctattttcctatggacttttgcattatttcattgtgcatgcatccagtgattatacataagcaacatatgtaatctgcttatatatttttaaaaatccatccacacacatggtaaattaagtataaattcttttgcaaaattatagttcatgtcattgaaagtttaaattggtttcatttaaagatcaatatactaggtctgccttcactttatagaaaactagcttctataaagattttttcactgtttactagtgaaatgagaaaagcaaagctatttataaaaggccttatgtcgtgtacatacattgtctttgaaatatttgtgatctagtttattgcttgtaaaagagaaattatataatttatttagtaaatactactgtaaactatagttttgtgagagaaataaaatattttgttctca

SEQ ID NO: 828 - DNA, 472 bp, Homo sapiens
  misc_feature: n=a,t,g or c
atctttttttcgacaaatatcctttcaaacagaaagaacccaaagagacacctcaaaatgcctgtaaaattattgcttttctttctctaagtcaggcaggcgaggctacggaaaggaagagatttggtaagtaaattacagttttgtgattgctcccgctaccgtgactgcatgtccgtgagcgccagcaaccgagacaatggtctctcacactctggtagcattcgctcaacctacaacactgaggaagaaagccacactgaagacacaaggaaaacaagtcaatccagtctagagaacaacattcagggaaacagagtaccaacaccttcttagaacatnggaaataaaaaataactccatcagagctacctcgccaaggagcatgttgaaagtccaaaatagcaccattcatcagtgtctcaggtcctgtggcagcatctcggtcacttaccacaaggaaacaatgagt

SEQ ID NO: 829 - DNA, 697 bp, Homo sapiens
  misc_feature: n=a,t,g or c
tggacacgctcaggctggcgtccagctacatcgcccacttgaggcagatcctggctaacgacaaatacgagaacgggtacattcacccggtcaacctgacgtggccctttatggtggccgggaaacccgagagtgacctgaaagaagtggtgaccgcgagccgcttatgtggaaccaccgcgtcctgaccttggaggtgcgagtctgggaaaggcgcgctcccggggggangcgcncnctgggaaggcgacccctgccctcagtgctctctgtctctgcttccccctcgcaatgctcctctctctgtcccaccccgcgagaacactttacaacgacgaggagattcgtttccaaaccagaggagatcaattgtacttacaaagattcccatctatttaactttattaacttctaccgtgaatgactctgcaagccttgctggtccaagtgcaatatgtaattataaatatataaatagataagagcctatcaatgtatcttttgtacaatatgttgtaaaatgtagatcataggatagctgactttgacagtcacatttataaagtaattcacttaaagatatatatttttccaacaagtttgcacttttgaaataaaccttctttatatgctaaaaaaaaaaaaaagatnggcggantttccttggggggtaattanttgatgcgcgttaangcgg

SEQ ID NO: 830 - DNA, 468 bp, Homo sapiens
  misc_feature: n=a,t,g or c
tttgaagggcatcactttattccaaagttgatcattagtgagggggatttttacagtcttctttccctcctccctcagctgcctcctggttagagatgctaacaagaattacgatggtcctaagatactggaggaagtaaaaaagttgaaggccctacatattttagttcacgtttggcatttcttggtctttaccctatataaggcaaggagaaaaagacatgaaatttaaattacagataaacacaagtgtattagtccattttcacactgctatcaagaattgcccaagactggataatttataaaggaaagaggtttaatttgactcactgttccacatggctggggaggcctcaggaaactttacaatcatggcagacagttgaaganggaaccaaggcatctttcacaaggtggcnagggaagggagaattgaacnccagggaagggactnatccaaaccnt

SEQ ID NO: 831 - DNA, 410 bp, Homo sapiens
aaccaaagctgtaaacatctctaattatatttaaaactgtagagtgcagtacattaacatttaacaatcagacactaaattggagtgacgctaatagcattgtgtttattagaaattgggcaccaagtcgtctttcaccagtgacaacagaaggaacagaaaacctccatggccacccttccccaccacgctgcgtgttcaggaagagtcttgtccaaatccccaccccctgagaagatgaggattgctctgtggaaaatacactcagcagaccagacacagctcagcgcccacgtctgttagccttaggcacttgggggaatggttttttttcccagagaaagaaagccacttttaaaaaagcagtaatcaattaattcagaatgaggcaaggcttaaccttctattct

SEQ ID NO: 832 - DNA, 470 bp, Homo sapiens
tttttttacatgaaaacatgtttattgcctgaataataaaacttagctaaggagttattagaattaggattccccctacttgaagtacaagtttccaataaacagacagacagaagcaaaaccccaaatgagaaagaatacattggtaacctaaatcataggcatttgtgggtatgttcatacaatctacctatttctttgtaatttactatagcactgatgacaaagcatagacatacaatgagaaagagcaaatcagcatatcagtgtgactgtgcaaccactacaaagcttggccttcttaaatgtggccactttaacttacacacacccacagaggcatcagaaatctccctggcaaacacgatttgcctatagttttgtggcaatactggttacatagaacaaaaacaactctcagacccatgggttaataaataagagagaaaagaagtaagaaaccacttccc

SEQ ID NO: 833 - DNA, 429 bp, Homo sapiens; identical to SEQ ID NO: 99

SEQ ID NO: 834 - DNA, 516 bp, Homo sapiens
tttttttttttttttcagcaaatgtttgttgaattttattactttttaaacaaattactgagtaatcttccttagtaatcatttctgtaactcagataaaaatagaaatttataagagtttttatttttgttacttgtaaaagtatatttcctagagaaaatatcagcagtggtagagaccagaaaaagtaagtgtgtgtgttctaaacagtgattccaactcaatgtgttcagagaaaacactttgaccctgtctgtgtttacagtccctgctgactgtgtactgtcgtatcctcagccttgttctatttctttattttagctttacagagattaggtctcaagttatgagaatctccatggctttcaggggctaaacttttctgccattcttttgctcttaccgggctcagaaggacatgtcaggtgggaaacgtgtttctctttcagagctgaagaaagggtctgagctgcggaatcagtagagaaagccttggtctcagtgactccttggct

SEQ ID NO: 835 - DNA, 445 bp, Homo sapiens
  misc_feature: n=a,t,g or c
tttttgtgagcatgaattatttcttgttttattgctttcttgtttctttcttgatgcagagtcaatgtttttgagtaacagtaataagatgcccaaaatccaacagtaaacattcaaatagtaagatctgatgcagaacaaagtcctcaaatgttaactcctataagttacatctagcggaaccacgagggataaaggctgaactcatcatcttggtttatgatggaaaccgctatcctctgacccagggaacaggatggaagtctcgaatgccagccacctgtttaggcactggtggcagcactgtgggtctcctcgtgaaatgggccggggagacttcacagtgagtctaagtatggcaaatctctccttttaccccaggattaagagatnccccccgcaactgagagaatcaaaagaaactcctatggaatagaagacgtgg

SEQ ID NO: 836 - DNA, 408 bp, Homo sapiens
tatttttaactttatttttattgttgacactattacagatagaatgaccacaaccatattaacaaaccaaaaacctgtgcacagaaacaagatgaagaaaatatatcaagatgttaaccacactctttggatggtgaaaacatgggtgagtttctcttctacatttctgtaacttcaaagtttctataatgaacacatttcatatataatggaaatatatgtagtaaaggtggactaccaaaacactagaatgatgacctttcaaggaaaccgaaacaaaataaccataatcccacaacaaccacacaactatttcttgtttttcatctttcttcccatctttgacatttatgcatacttatcactaacaccctaataatcacagactagtgcacagatcaagatgtt

SEQ ID NO: 837 - DNA, 399 bp, Homo sapiens; identical to SEQ ID NO: 108

SEQ ID NO: 838 - DNA, 419 bp, Homo sapiens
ttttttattagtgtaataattttattaataaaacgaacccataggttcataacaagcatacaaagtaattttttttcctgtgggttaaattgttacatttttaataataaaaataagaaagctttcatagttaacttaccaaaaacataacgcttgcctattgtttcttactgtgcaaaacaaaaacaaagttttgcccacagaaggattttgtgcaccaaaacatgcacattttcaatttcaaaatttctgcatcaaaatgaaaattccaaggccacgtttttgttttttcaaactaaagaagagcaagaggggaatcaccaagcaaataacagcagctacatttttaatcttcattcccaggtattttctgtttcaatgtagaattctccacattcataaaatgatatcttcaacct

SEQ ID NO: 839 - DNA, 479 bp, Homo sapiens; identical to SEQ ID NO: 338
  misc_feature: n=a,t,g or c

SEQ ID NO: 840 - DNA, 407 bp, Homo sapiens; identical to SEQ ID NO: 119

SEQ ID NO: 841 - DNA, 577 bp, Homo sapiens
  misc_feature: n=a,t,g or c
ttttcagcttttcagaagttttattataaagagatttgagagaagcactgggcaccaagacagacactcgccagggccaggaaacagctgcaaacgacgtcaagaacccaaacccaaacgaaaccccaaaaccacacacacggtaggataagctgtaacttcattctcaaggtttcttcataaatagacaaaagtcgtcgccggcaatttaaaatagatgaatacatgattaaaaggagagcagtgctccgggggtggctagcaagcgtccggtccttgctgtgaggatgacgaaacggtttggcaagccgcttttgtgcgcgtctcccttaagataaaacttaaaaatgtgctaaggatcatataaaatgctttttaccctaaaggaaactacttttttnccccacaaaatagtcttacagatggtctttcagcacaggttctaaaacacgtaggtcaactacttacacggaacccacaggtttctagggttcgtaatcttttggtcacactggaaaaccgatggtgcacatctatgccggggggcgggccctctggccaatggcatcttgggggg

SEQ ID NO: 842 - DNA, 342 bp, Homo sapiens; identical to SEQ ID NO: 127

SEQ ID NO: 843 - DNA, 379 bp, Homo sapiens; identical to SEQ ID NO: 346

SEQ ID NO: 844 - DNA, 325 bp, Homo sapiens
acgtatagcaaagtatattgtaaacaaatttaatgaccaaatgatagactggtaaaaaatgtgcctatcaccaagggctgatacctttcctgtggcccaggcctctgctctttaaaaatggggcacaaatacaggcaggtaagagacagacagctctcatcctgcactcttggctttctgagaggtatgaccccaaggtcctggagtctagctgctgcttcctcctctgggaaatagaggagtgatattggtagtacctagggcatagcactgctgggacaattcagtgatttggggactgatctccatatcaagatgacctgat

SEQ ID NO: 845 - DNA, 351 bp, Homo sapiens
atcaacaatcctttaattttttatttttatttttttccctgggatttcgaaccaatatactcctagcctgaacaacatagaacatttcctttccattttggtagaaattattttttaatgtaaattatattgtgttctatttgtttccaatgtcttgaaaagttcaatcacttctccaaattctccgaataaacataagaaaatatctctccccagcactacccggtcccccagtatcaccatcctaggaggcacttccacttcctctatcatcagggaaggagtgtgcagttctgatttagctcctcagtggagtaaagggaatttagaggaagggggatttctgcagaa

SEQ ID NO: 846 - DNA, 359 bp, Homo sapiens
tttttttcaccgtgttcctggagctgcccgctgccctctgccctgtccgtccccggcagagactgggagccggccctcagcatgaccaccgaaactttatttacaacacgaggctggagtaagaggggtgggatggaggacagcagcagggccgacagaccctacttctgctcccgcctccagacgatgaccatgccgctgggttcactggaggccagtaggctctcgtcgcagttgaagctgacatcaagcacaggtgcactgtggccctgcagcttgttgacagcagccttggccgcccgctccacatcaaagaagtgcacgcacatgtcctcactgcccgtcaccacgcaggcccc

SEQ ID NO: 847 - DNA, 271 bp, Homo sapiens
ttgtgcttttaaaagtccttttaatacagcatgaagaggctatatttctataggcgagccgtatacagattctccaggaataaggcacacaacggaatgccatcccaagggctgcacttcggagacgtcggagccttctccacgcaccttccgagctgggcccacgggttctgttttgtctttttagctggactcacacgtatggacagacacagacacggacggggtcaccgcatgggggcggaggaggtcggacggcaaggttggcaac

SEQ ID NO: 848 - DNA, 460 bp, Homo sapiens; identical to SEQ ID NO: 141

SEQ ID NO: 849 - DNA, 379 bp, Homo sapiens; identical to SEQ ID NO: 361

SEQ ID NO: 850 - DNA, 412 bp, Homo sapiens
ttttttttctagtcaacaattttattttaaagtttttcaaaatacaaaagttagcaaaaagctgaatatttacaattatgtcataggttactattaacagtgcagaggatagagtatgtaagaaagactttgaagaggaaataatatacaaagtacaataaacagcaaggttacatgtcatcgttttgccaccgtacagaagtggaaagtgccgacctggagaggtcaccgttgtttcatttctctgtatccagaaaggaccgtctcttaaatccaccaggggaggaaacagcctcctgtggaaaatgctgtcttctcaggagcattgtatctgcacgtgccaatcacagttcctcctccgttcgcaggtactgggtacagttctgaaatctttttcagctgagcagcgttt

SEQ ID NO: 851 - DNA, 421 bp, Homo sapiens
tttttttttttttttcattttgaaaatgctttaataagtgttgacaacactgttttgcaaaatgtaaagatactatacaaattcttaatacaaaaagaataaattaaaagcagatttctttttttaattctgcaactttgtctacaacgtacatctttttcattgattacagttgaacagaatccagtaaaatcattttacatgctctacagtcagtttcaggagcaacctaatcttttttcccccattattaaactagagtccattttacacaacttgtaataaactattgacattaatgtatatgtaaaactttacacctagttaactaagcagtaactggtcatctgatagcacctggatggggtttgctatatttagaactaaactaatactgaatgaaaacaaattggaattttaa

SEQ ID NO: 852 - DNA, 490 bp, Homo sapiens
tttttttttttttttttttttttttttccttttagtaagaaaaactttatcaaaaatttaaatatataaaataaggccagagcgtgcactggaggccacttcccagtggtgcactgctgcgctgggtgtccctatgcagctagatacatgttaactgcatagagtaccataaaggagcccactggtgagcttcactgtcacctggccctgctggctggggcttccattgtctactgggtctgtccacaccccagattgccttgtggtcctttcccctggccaagaagataacagttttttaaaaatccccttctgatatggatgtgagcaagcagtggggttcagtttgggaccaagtagtgccatttacaaagagcatgggaagcacctccttaggaggggagcagggccatctccacgttgtcaggggccgcgccgttgcctgccagaccctgggcccacttgtgcaggcggctgtagagtgggaggc

SEQ ID NO: 853 - DNA, 394 bp, Homo sapiens
ttttattgctgaaatagagtctttatttctgaacattccaaaacagcagtgtacacagtaacaaatattaagttatatgccataagaaagcattcattagtgcaaatggattttgtaaaaggtctatcaaaaagatttatttgctttaaaatgcattcatttccagaagcattgttaataaaacattacagtttcatccttcgtaataaagtattgaaaatcaattgtggtacagtagcaaacattgcaggtattaagtgcaatgagctcatgatgccgttataaatatgaaacccatgtatgacaataaattaaaaatgaaaaagacaggaccatttaattctgctgtctggttatctccttgcaatgcttcaaattatgttgtgctcattca

SEQ ID NO: 854 - DNA, 394 bp, Homo sapiens
tgtagaaattaaaacactttaatataaacatttccagaatatagactgaccttatatcagtactttttgagaccgttttaaaactatatatcatctaagtttattatagactgtttcattttccactttcagaactagaaaatgcaaaaatacactgcaaattagatttaacaaagaaaaaatcagtttaagttatttcatacatattccttggagaaagctgagacacataaacacagaaaaacaacaataaaataccaccaacactaacacaaaaccaaggaaagaactgattttgtaacgcttggtaattctgtcctttaaaataaattatctcccatgaataaataattcactatcacagcaatttgatgagcagaagtagagacaactt

SEQ ID NO: 855 - DNA, 323 bp, Homo sapiens; identical to SEQ ID NO: 162

SEQ ID NO: 856 - DNA, 418 bp, Homo sapiens; identical to SEQ ID NO: 375

SEQ ID NO: 857 - DNA, 317 bp, Homo sapiens
ttttttttttttttttttttttttttttatcgtttggagaagtttattaccacccctaccctccagtgggatctcaatgtcacgatgagtccggggctggctttccgccgggaccctcctgtcctggcacatggcccaccccagcacgaagcctggccgggagggctcaggtgggtggctgctaggccaggcctccccagaacgactgccccatgtccagcctgtatctcctgagtgccatgctgcactggggagggacagggctggctcggggctccaggaaagatgcctcacatgtgcctagaaatgtaggcgtc

SEQ ID NO: 858 - DNA, 378 bp, Homo sapiens; identical to SEQ ID NO: 167

SEQ ID NO: 859 - DNA, 199 bp, Homo sapiens
caaaacaagacaatgttttaattgtaaaactaactcgaggcatgggtgggcgggctggggctgcgctgaccgggcaggaacctggttcttcaggcagtggttctgccagggccaccccgcaggacagggaccatctgtcccccaataagggcaggggctagagtgttataaaatgacaatataaatagacttctagaaa

SEQ ID NO: 860 - DNA, 461 bp, Homo sapiens
tttttagtttttttttcaggtgaatatggttttattcagcaacagctctcatcaacagcttacactagctctctcacactgtccacctgccttggctgcttgagcccgtggttcccacacacagctgtgcagcctgctctcccttgccttcagggtcagcagcttaactttttctctctctgggcgtgacaacctgagctgtgtcctggctccttcctgtccatctgcaaaacggacagctttggctctctctctctcttactgggcgccagtgtgcccaccatgtcaagccatgttgagctgagccgaaccccaagagcccctgtacagcattagcaggacaattaccttttacagacaacagtggctcagaccaagtatgaacttacacaaacaggttatataacaagtggaggtgtgtgcctgtgcaccaaacccactgagtcatgcaggcatggatc

SEQ ID NO: 861 - DNA, 311 bp, Homo sapiens; identical to SEQ ID NO: 176
  misc_feature: n=a,t,g or c

SEQ ID NO: 862 - DNA, 247 bp, Homo sapiens
cacaaaggatttgctgtaagtcttcaagtcattttgtccaatccaaaagctgtatttaagcgtcgtggatcccagccagggatgcaagaatctgactttctcaaacagataacaacagtcgaagaactggaaccgaaagcaaataactgcactaaggtattcattacacttgtgctgcccgacctcgagtgtcaccatgaagagtgcgctacccaagctatttccttccccttcaggttctcgtgtg

SEQ ID NO: 863 - DNA, 249 bp, Homo sapiens
aggatttctattcatttttattcattcctccaaagagcaccacaggccaaccacacccttgatgtgtccttcatggttccccactgcagtggacacaaatccctccctcattatccaggcatggatggaactctgctgtggtgaggaggttgtctcgcccactcacccaagttttccatgcctgttctgcttttgatggcaatgccaaaattcatcatacatttccttgaattcctgccttcaagggtc

SEQ ID NO: 864 - DNA, 337 bp, Homo sapiens
cttcaaggggtccattcctttaagacaattttggatttctttaaaaaatctattttatttgctatattagatggctaacccaaaattgtttcttgggttattgagtaataagtatggtttaaatggcctaaatactacatattttaaaagccttgatgctggcagagctgcactgaggatctgtgtttttaagaagtgcctgggtcgggtaaggtgaaattctaaactggaggacacattagtcagtttatctctctaaacttgttcatccaaaataggctttttaataaacaatttagcttatacttcaaattaataatccccccacacacattct

SEQ ID NO: 865 - DNA, 305 bp, Homo sapiens; identical to SEQ ID NO: 201
  misc_feature: n=a,t,g or c

SEQ ID NO: 866 - DNA, 475 bp, Homo sapiens
  misc_feature: n=a,t,g or c
ttttttttcagttgagcagacatttattaagcacctatcaagtgcaaggcntgttgctaggcgccgtgggaaatacagagaacacaggcggtccctgcccacgaggagctcacagtctagaaagggcagcaagacagtacacaatcagtggcagcagcaccagccagagtggcaagtgctcaaagcaagacacaaagtgctgtgcggttcacaacatcatggggatgcttctggcagaagcactggaaaggagacgaggactcaggctgggccttccagggagggaagccatttgggagaagggcatctctagcggagagaggtccatctgcagagcccacaggtcatgggaaacatgtggnctgcagggagagtttgggggacanttcaagtatggnctggggaggtngacagccacggacattaagttcaggagattttganctttntggtctggttcaaacagccactncag

SEQ ID NO: 867 - DNA, 279 bp, Homo sapiens
tttttaaaaaattgtttaccctgtacatgtttctattgaatcctaagtacgaatgcccaaggagataaagcaagtgcagttaagtatgcatgggaaagctaaaatgggtatgtacataagatcggcaaaggaaaccaagttctgtaaaatgagttctccctcccctccagggtagctgattatgaggaaaataagaaagagctttgcttttctccttagtagtaatggtctacaataagctgcacacacacatccctcatcacacctctctgctcaaaa

SEQ ID NO: 868 - DNA, 440 bp, Homo sapiens; identical to SEQ ID NO: 242

SEQ ID NO: 869 - DNA, 252 bp, Homo sapiens
  misc_feature: n=a,t,g or c
nnnccttattttccttcaaaaaatagtttattctgcacatttcctagtaggctctctgcccaccgttccagggtagcagctactcataacttgtctttctctccaaaaccaagagggccttcccaacagaaaaaccttcagttcccaaagcagcatcgattcttcccctcaccccagcaaacctcggggtgggaataatgaatcattcaccttctcccacccctcactgccccgccccaccttcatttgccg

SEQ ID NO: 870 - DNA, 298 bp, Homo sapiens; identical to SEQ ID NO: 262
  misc_feature: n=a,t,g or c

SEQ ID NO: 871 - DNA, 477 bp, Homo sapiens
  misc_feature: n=a,t,g or c
tatattttctgactgaatctcaaaattagttggggcattgggaaagaatttaatttgacttttgagtgtaaaccaaggatgtatttctttgaaaagataaaacaagagggctaatcatcctaaacatgaatgtctgcacagattgaaattcccaagatgcccaggagcccagcctttgcacagcctccagcaccgacattatgtgtgttttcaaccacttcccccttatacaaagggatatgtttgcagagtttctcaatgggtgacccaagcagggaaccaatccacgtctttgatcagagactccagaggggttgtacttgacccagggtgtatttgttgggagaacatgttgtccagagcctgtttctcataggatgtaccattgggagattgttcagaggangggatgttctgatgggnccatcttcagggtaaagcaggctcttcgggagagcacccggggntgcaatntag

SEQ ID NO: 872 - DNA, 397 bp, Homo sapiens
  misc_feature: n=a,t,g or c
tctttattggaaggaaatgtgttaaagacagactcactacagtgttgagacagtagtgagtagcacagtaaggagactgcccaggacttgaggtccttggtccctctatagaagtatcaagtgtttgtaaaaggtttagcacccatgtgacagaaagaagccatcatcctcttaatttctcttgggttttacttaatatatagaagggcaaactagtggggcctctgagtgcaagatgagggacttcattaggaataaagncatattgcctctggggnttttctaacccataggctccaaggagccctcaggtgtcaggaacataggggtaagggggacttggatttactgaggaggaccccctacccctaccaacatcctgtggggacaataggag

SEQ ID NO: 873 - DNA, 399 bp, Homo sapiens
aagaacgtcagctcctttattattattattattattattattaattatttactgttatttacccctaaacaacagcataactcaaataataatgacacacacgtcccgcccatatacacaataccactagcctatctgtcaggctatctggcctttgcttggttcctgatggagctgtctggagacagtccctcctgtaaaaatcccgacttaaacacaggggacagaagaaaggggggacctaggtcagatcataaactgacaggctcccagcgtccttagggagtgctaatgtggaaacttttgagaacgtgctggacacatctgggcagagggcagaaggcactggtttgtttttatgtggttgatggataaattccatatgggggatataaggac

SEQ ID NO: 874 - DNA, 408 bp, Homo sapiens
  misc_feature: n=a,t,g or c
gaagcggagnattactttattcaggcagggactagccaggcagggcacagcgtcagcggatggggggagtcagcacatgggagtgccgtcacctccattagccacagncagacggccaggaggngtgctactgcagtgagatggtgcactactgcagtgaggtggcgcagggctggtgagcttgggcacaaaagccagcatgtcaccctccctttggagaagcctctgggccacaggctttttccagctgacgggatgcggagggaaggggacctagtactatcgggattcagctgacttagcctatngagatggagcaggcaagagattccctttgcagggtgggaggttatattcctacagcctccattcttggagtaaggctcctttgccacaccccttttcacc

SEQ ID NO: 875 - DNA, 454 bp, Homo sapiens; identical to SEQ ID NO: 281
  misc_feature: n=a,t,g or c

SEQ ID NO: 876 - DNA, 247 bp, Homo sapiens; identical to SEQ ID NO: 288
  misc_feature: n=a,t,g or c

SEQ ID NO: 877 - DNA, 365 bp, Homo sapiens; identical to SEQ ID NO: 289
  misc_feature: n=a,t,g or c

SEQ ID NO: 878 - DNA, 322 bp, Homo sapiens
cagatacaaagcagtatttatacatttatttatatatgtatatttacttcagaagaaacgaacatttcggggacaggaagcaagcaggcccggggctgcttccctcactgcccacctcagagtcagagttggcacatgacaaataccaagctcagggagaagaactgggagttaactgggaagtagggggcgctctatgcacacgcaggcttctaagggtgcacggtatgggcaggaggatttgcactgggaggccctatgtacagcttgaagctagggggagattagcccagtgactacaggaacaaacgccaaaggagag

SEQ ID NO: 879 - DNA, 321 bp, Homo sapiens
  misc_feature: n=a,t,g or c
caggttccaccagaggcttttatttcagccactcaggaccctggctttctgctccaaggcactgaacacagtcaggctcttctaaacactggcagggacctcccccacagccacccccacagggttctctgtttcccaagtcctgatggattcaggcaagaccttcacacattcacccactacctgctggagaggagggtcatgaggcagcctgtggtgcccagctcagtgtgacacactgccaatgtgccgcctcccccagcctctgatggggccgggncttgaccacgtgacaggctcaagctgccgtgcacatccccc

SEQ ID NO: 880 - DNA, 259 bp, Homo sapiens
  misc_feature: n=a,t,g or c
cacctggcagttgagtcagattgtaggaaaattaacccagatgggtctacatttttnttcaagttcaaaccacatggtttcctagtcagaaagtctcatggactttcttcctaagctgttctatgatcagaccacctcctaaatgtggcttttacccattacaggctacagttgaatcaggcaggagcagctgctggagagcacccagccgacagacctgcattccagaagcagcttggagaaactgggaagacatttt

SEQ ID NO: 881 - DNA, 471 bp, Homo sapiens
tagcaatataaagaaagatttattttcaaaagtagcaaaacttgtttgaaaaaaatatatatctttaagtgaattactttataaatgtgactgtcaaagtcagctatcctatgatctacattttacaacatattgtacaaaagatacattgataggctcttatctatttatatatttataattacatattgcacttggaccagcaaggcttgcagagtcattcacggtagaagttaataaagttaaatagatgggaatctttgtaagtacaattgatctcctctggtttggaaacgaatctcctcgtcgttgtaaagtgttctcgcggggtgggacagagagaggagcattgcgagggggaagcagagacagagagcactgagggcaggggtcgccttcccggggcccgctccccccgggaggcggcctttcccagactcgcacctccaaggtcaggacgcggtggttcca

SEQ ID NO: 882 - DNA, 252 bp, Homo sapiens
ttgccaatgatgttgagctttattaatggcccctctccagaggctgctcagttgtccccagggaactcctcagagatcctctgccttcccacatatgagcccgaggacacctcgggagcagagaagtgaaagggtttccgggtcagacgctgcactccacgcctgcgtcctcctcgtggctgcagtcatgatggccccagctattcttggtgcagctccacagggtactctccgtgccccgacactgaacaa

SEQ ID NO: 883 - DNA, 323 bp, Homo sapiens
  misc_feature: n=a,t,g or c
gtgacatgttttttgctttattgaaattctctcttacaaaaggtctgangtattttaggccaggcctaatttgctttggtccctgaaatgcaggcccatggtcatttccatgtcctctgaagtaggtatgtaaactagtagacttccatttttaaggttcacacactttttaacattgtttttatttgatgtaaaacaagacttatgttgtccctaatggaaagaccaagtaagagagttatgtgcgtcttcatggaagggataactggattctttgccagaaccgggttgggaatttagtttgttcaatgtggcatctttca

SEQ ID NO: 884 - DNA, 420 bp, Homo sapiens; identical to SEQ ID NO: 109
  misc_feature: n=a,t,g or c

SEQ ID NO: 885 - DNA, 403 bp, Homo sapiens; identical to SEQ ID NO: 112
  misc_feature: n=a,t,g or c

SEQ ID NO: 886 - DNA, 354 bp, Homo sapiens; identical to SEQ ID NO: 122

SEQ ID NO: 887 - DNA, 393 bp, Homo sapiens
ttttttttttttttttttttagttctacccatgtttattgctaccagctggtctccctccaccctctcatatttacacccaaccccttccccaaagctagcttttaccaaagttcctggtaggaggtcaagaagtgtgtccacttagccggcagtcctagatgtagtggacgctgtttgtccccaggccagttgggcaccaggaagggctactctggggattcagggcatagacttcgtactggggtcaagggaggcccccactcacagatactctcctttccttctggggctcaatgtacaccaaaaccttcagaaagcaaagttggagtggtggacccccaatgtcaagtttagtgctctctttgcttgtgatgacccacacaagtggcca

SEQ ID NO: 888 - DNA, 338 bp, Homo sapiens
cagaggtcttgtcttggtttattcaggctgtattgagattgggaggatgggcaaaaacctgggggtggggctggcaaggaggcagttggcctaacaggacagagctgagggggccaggtgggttcagggagggcaggagactcggggcttcatatccggtttctgcacacgggcagtgagcgggaacttggtgatgccacaggtattgctccctcggtgcagccggaaatagcccttctctccccattgggccccccaggagttcttcaggatccagtatggggtggggtgtggaggctgaggctgagactgcgatgagactgtctctgcccatatcc

SEQ ID NO: 889 - DNA, 419 bp, Homo sapiens; identical to SEQ ID NO: 139

SEQ ID NO: 890 - DNA, 427 bp, Homo sapiens
ttgacattacaaagtattttaattcttttaacttagtccagacacaagaagccagattatattttaggtgtcgacagaactatttttttaaaatagcaagttcaggtgagttagtagtcatgaaaattaaaatgaaataccaattccatttcctcgtgtacctctttgcaaatgtcggacaaagcagagttttataatagtttaataacttgtgtaacaacggtggctttggtgtatctctaaagtggagtctttaaattataaaggattttgtgtgcttgaaatcattttcactcattgtcgtggctttagatgaagaattactcttctggaaggaggtttcttttgaaaagtagcctttcctctgagcatagcatacaccaaggccacaaacggaaatcactaaggccacaactactacggctgc

SEQ ID NO: 891 - DNA, 380 bp, Homo sapiens
tttttttttttttttttttttttttttttttttaacttcctgaaaactctttataataatgcaggacaactgtatatagcaaacgccttcaaaatttaaactctttaaacatttaattcttcagcattaatacacacaaatgcggtaacaggggtcaggggggtggtgcgggggcaggtgggttacagcctccactgggatcagggtttcaacagtgttacttataaattatattacatcaattttatttactgatctaggcagccagagggtggaaggatatacaatgtggaggaaacacattcataccggggtgaggagtgctggcgggagacacggctctttaacatgaaaaatgtataaagtatttagcaaaagtt

SEQ ID NO: 892 - DNA, 383 bp, Homo sapiens
agagtaaaaaaggagtttatatatttataaatgccaaataaataccagaggccacccaacgccccctcccagacagggctgtctcccccagccctaggcttctagggtgtgagacatcttggccccaagctatagcccaagagcagctgtcagtctgtgctaccagggaactgagtgaggatgatctgtccagccaagtttcactccccctgtgtgaggggcccccatagccacaggcctgggtccctgtataggaccctaagggtgaaagactcagggggagaaggtggccatctcgagtgagacccgctgccacagctccttggtctgtttgctgcgcttgaggttctgtaggatgtcgttgaactgcatcatgcccatgg

SEQ ID NO: 893 - DNA, 412 bp, Homo sapiens
tttaacaaaatgctttatttctatttttaaatgagaggcattcccatgaaatatcaaaaggcatttacatgtgttgttttaactcttcttttttgatcacacaaagtaggtagaaaagatctgctgaaatagagcaaatcagaaaccaagtagtgtaaggcattaggagatacatgaagagaatcgctatttgcttcttgtacagcgtgtggcaagtcatggttagtagtcatcgtagttgacgctggctccatgcctaaagccgtaggggctccggggaccaattgcagagtcttcatcatagtgacgttggtagtaatcgccatagtattcatgtccatttcgatctctgttaagccaataggtgatgtcatcttcaaatttcgcttcgtcaaagcccatgtagagaaac

SEQ ID NO: 894 - DNA, 451 bp, Homo sapiens; identical to SEQ ID NO: 422

SEQ ID NO: 895 - DNA, 376 bp, Homo sapiens
gagttatggtagtcatgagagcatctgatagctcctctgtgactcatccatttattttaatgacatctgaatatgacagtatattgaaaaaagaatgcatgttatttattccatactggggaagtgccactataacattgttttaaaaaatcttcaaaaatttcctattagaacctatcattgaattagaaaagcaagctttgccaaatgcctgattatgcctttactggtcctgctagctggcatgtttcaccaacttttccctagtgtttcctttggcactgttgagcccacactacaaaacatgaacaagtcccacaaaaccacactatgccctctgcttccccatcatgtggggaccatctgcctggacatc

SEQ ID NO: 896 - DNA, 381 bp, Homo sapiens; identical to SEQ ID NO: 156

SEQ ID NO: 897 - DNA, 457 bp, Homo sapiens
tttttcaccagaactgactttattaaaaaaatgacaaaacaggtctatacatatttacaggctgggagccaggaggctcaggtccgacagcaggggccaggctgctcacttcttggagagcttgacttgcttgtgcttggggggtgcccacttgaggcagacggagccactgtgatgggtggtttcttatactgggcacttttgaggtgctcctccaccagcttgggtgtgacacagatcacgtgctggcccttccagtacttgaccatattgagggattgcagggtactgatgatgtcattttgggtgatactggtcatctggctgaggtccttgatggacagtgtgccccggaagtcccgcagatctccagcagcacccaggaccagtagctgcggtaactgagcttgcccaagtcagacagcggcttctccggggagccgactgtgctctccag

SEQ ID NO: 898 - DNA, 514 bp, Homo sapiens
agaacaaaatatatggtatttattaaacacatgtgacataggttataatatcaaagtagagcatgcatgaacagatgattcattcgtttaacaaaaacaccaattgatactgagaacactaaattattaaatttccaagacatataaaattctctttaagttaaagtgagaaagaaaaaaaaatcacaagttgaataaatacagtgatttcagctggtccaatgaaagcataaggcacaaattaaaccaagggactagcgcatcagaatgaagcttgtctggcccacacaagtctctcagtgtggctcccacgaccctgcacagatgcttgggaccaagaggaaagagcacctgcaggccgggaaccctcccttccaggttcaagtttggctgggtgcccatgcttcttgtggacaggcctctctgtatcagagaaacgctgcctctaatacttttatgggtaaacaaaaccttcatgctctatcaaacaatcctggcatgaataacatgaaac

SEQ ID NO: 899 - DNA, 310 bp, Homo sapiens
  misc_feature: n=a,t,g or c
attttgtctttttttttttttttagtctaaagaaagttctgaacagaatatcaattaagcttacatcacaaaaactttaaatgtatttacagagtgaataagttacatagataaacyctgaatatgtttctgcagtgcaacaagttcacatgcacacatctaacacttgacagcattaagttaaggagagacttaagatggccctttacatatatmtyvcamataanmtatgacatcgaagaaacaagtaacaactcatattttacyttatgattctacttctgactatccaaacagatattaaaatatg

SEQ ID NO: 900 - DNA, 449 bp, Homo sapiens
  misc_feature: n=a,t,g or c
ttttttttttaatctggtaattttatttaatatttaccattcagcagcaaccaacatgaacatgtgggctaacagaatcncttaaaatgttctgctatgtagctgcttcagaaatacacacacatgataaattcaagataaattcaactggctcactgccaaaattttttttaaaaaatggctccaagagcaaataacactgatttataatgtgcccaagcactacgtcaacaaatctattaaattacacaggaaaaggaaatcaaggaagctttgttatcttatgcatgtcatcttatttaaatggaaggttttacttctttaaagcaacagaaatatggagcttcacatatatatgtatatatatatgaatgtggttacaaacacgaaggtttattcaaaagcaaaagctagttcaaaaaatttctgactgcaaaacttggcaagat

SEQ ID NO: 901 - DNA, 510 bp, Homo sapiens
  misc_feature: n=a,t,g or c
cccgacaaagatgcctttattgggcgacagacgcggggtggggcgctangggnggtgcacggcgggccggtacgcagngatnctcggcgctgtgngancacgtgtatttgaactctttctcctgcatcgcgctgtccaggtagcggcgtacgcgangctccgcggggatgggcgcctggcggaagtgcgcgcacaccgtgtcgacgatgtgcagcttgggcaggaggctgcagtcggccagcgtganctgtcgccgtccaggaagcggcggcgngactcgcgcantgcggctcccccgccagctcgtgctccaggggcgcgcgcaggtagctgtccagcctggcgagggcgcgcaagctgctggtacagggcttcgtcctgcgcgggcacgggttcttgatgaacgcggagaattgtggaaaacgtcgttgccggcggtgttggactcctgtaagagcgccagctggggaatcggcggcccaangtctctcaggaatcngatttnaacgt

SEQ ID NO: 902 - DNA, 282 bp, Homo sapiens
  misc_feature: n=a,t,g or c
agactttattcaaagaccacgggggtacgggtgcaggaaggggaggaggggctggggggaggccaagnaangaagcatgncaccgaggtccagcttcacggtatttggaggtagcacggtgctcacagaaagcaggaacttgtccagggaggcgtcacccagggtgaactcggcggggaggtgggcgccagggtcaccagcaggcagtggcttaggagcttgaagttgaccgggtccacccaagcttgtgcgcgtnccaggtcntcagggngacangcgttg

SEQ ID NO: 903 - DNA, 301 bp, Homo sapiens
  misc_feature: n=a,t,g or c
ggtttaattatgggaaaaagcactaaagttaggtaaatgattttgtttgtcatgcttctcttgacaggcctgtggggggagaatggaaacagagatgccccttggcntgnagntagacacagcttgcagtgcacaggcagaggctctgggtcagtgcaggaagcagagtcaccgccagtgccttgggatggggatcacagaaggtgacctgtggctgcatgagccactgtaggactctgacctcagtgggacaggatgacacaggcagctaggaattctgggcaggggcaggtnggcatta

SEQ ID NO: 904 - DNA, 341 bp, Homo sapiens; identical to SEQ ID NO: 274

SEQ ID NO: 905 - DNA, 418 bp, Homo sapiens
  misc_feature: n=a,t,g or c
tcatttgtcttcacctttattgaaatacaaaatgttaagcattcaatctgtactagtaaaggtgtttcttgaagttgataaaggagggctgggctgcttgtggtttcctccaatatcacactttcatttatttcatacaccaccaacaactctcaatgcttaaccattttcagttgccaggaaagaggtagaaatatcttgtcatggacactcgttctatggtgggcatttggactgttgcctccggactttcaaatgcttgctgaaccttccaaaatacttcctctaggtggcagcgcaggaatatctctggaagcatgcgatgagttgtgtgatgaagatgggaagccccttggtgcccgtctctccctgggacacgttatcctgggntgtcaagattccccttctacaatccaca

SEQ ID NO: 906 - DNA, 610 bp, Homo sapiens
  misc_feature: n=a,t,g or c
ttttttaagatgtgtcaggtgtttaatcatcattgtggggggctctggttgtagaagaaagcttggcaaggtggggttatacaggagagagattatacaggagagagttggtctgaggccagaacagttcaagggaaaaagaaaagggagctgatggatgggatctgtctgtgggcccctcaaggcctccagtactactctcgcctgcctcaggttcctccgactgattcagttctgcacgctcctcctcttcctcctggttttctggggccttcctctcctctcctcggcgttgcncctttgccacaagatgaccccaatgagcagggcggctgtccccaggcctcccaggatccccagggccagggctagagttcccagccctgatcctcccacagagcctgcagttggcccctcctcgcctggttcgatgatgctgatgctgacagcacggctttcctggggcccgtgntggaatgggtggccacacagctgtaggttccctggtcctgaggcctattcagggaggattagacagggtggggggnagggaagggacctcgtgcgaattttggctcgaggcaaattcctatagtggtcgataattgga

SEQ ID NO: 907 - DNA, 189 bp, Homo sapiens; identical to SEQ ID NO: 279

SEQ ID NO: 908 - DNA, 406 bp, Homo sapiens; identical to SEQ ID NO: 105

SEQ ID NO: 909 - DNA, 429 bp, Homo sapiens; identical to SEQ ID NO: 106

SEQ ID NO: 910 - DNA, 554 bp, Homo sapiens
  misc_feature: n=a,t,g or c
tttatgagcaaatccaaatttattttaatgtcatgtcattttcaatgtgtttaaaaacctcataagttagtgggagccctagtttcctgggacagcatgccagaggtactgaaatttgtcacctttctctacaaacccccagcaatccaatccaagtccatagcttcagaaagccaggagttgtgtcttcagtcagtctacgcctctggttcntgggttttccttncatggggaggggagatnncaanatttcaaacaggggaacaaaaccaggttgaggcttccangctcagggtctgtgtaagatggagcgaggaaagaccccactngactccagagaaaaaagggtaaggtttgagatggattatttcntttacagctttggtgaaaatgggaagaaaaaagatttacaaatgaggatnccatttcataggatggagaatctcttcataaatgaaggctccaggtcccaaaatggggagggggcctgactggacagcctgaatcngatgaggaatcggccacactggattanaacaatctgaaaaataatc

SEQ ID NO: 911 - DNA, 463 bp, Homo sapiens
  misc_feature: n=a,t,g or c
aaagtataaagtgttttggaaaaaaaggaaaaaaatctatataaaaatctcttcacatataaaatcctgaagaaggtgcaaggtgagacccagtgcgaggggcgtgctcagatatgcagtgtgtgtgtgtgtgtgtgtgtgtgtgtatccgtgtgtacatgtgtgcacgtgtgtcgtatgtgtctgtgtgtctgtgtgtgtgtgtgtgtgtgtgtgtgtgtgtgtggtgggtgcaagtgcacgtgtggcccacagagggtggggagaaagcttggctttttacttccatccaggagggaaggagggcggctggtcctccagccttggagggtctgcagctgggcgggacctctactcagccaggctgttgcgcatcgactccttctcctggagggcggccatggcaagacgcaggtgctccttcagctgctcgatctcccgctcagaccgtgtctngatgtga

SEQ ID NO: 912 - DNA, 216 bp, Homo sapiens; identical to SEQ ID NO: 134

SEQ ID NO: 913 - DNA, 239 bp, Homo sapiens
  misc_feature: n=a,t,g or c
ctaaatgctttaattttttgtcacaaatatttctgcatctctcagtcccttcttgttggaaaaaggagggctagtgatacatttgttaatggcacttttaaaangtgctttggtatatagaggnaacaatgtacttcnnaggnatgttaataataaattaaggttataatggttgccatatcngagngaatgnataagattagtctcagcaaaaacaaaaattagtttggaagtagata

SEQ ID NO: 914 - DNA, 216 bp, Homo sapiens; identical to SEQ ID NO: 137
  misc_feature: n=a,t,g or c

SEQ ID NO: 915 - DNA, 361 bp, Homo sapiens; identical to SEQ ID NO: 146

SEQ ID NO: 916 - DNA, 354 bp, Homo sapiens
ttttgtgttttttttttttgtggtcttgacaatttattggaataaaaaacatgtatcacttattgacagagctttgtgttcaaggcacattcatacccatttcctcagcagaacctcacatccctacgaattagacaagtcagtcattattctgcagatgaggaaactgaggctccaagaggataagtgacttctccaaggtcataccactggaaacagcaaagtcagagctagaatttcggggctcctgagatatccagaattctttcactgtgcaatgctgcctctccaataaataaatgaacaaaataaataaataaagctttcaagggaaccctgaggaatcctccctca

SEQ ID NO: 917 - DNA, 423 bp, Homo sapiens
ttttgtcgagaggaacgcacgttttattggaagtcttggcggcagggggagtctgcgggggcagggctggggaaggggcggcggagggggcggtgggcgcgcaggtggagcgtgggagatgtcaggtgccaggggagtcctggccggattccatcgctccaggtgtttctaccgcctgcggtcggacagacggcggatggagctgcggaaagttccctcctcttcatcgggttccccagtcctctgctgctggttgaacttgcaccggcatcttctgctcagcacgatgaggatgcccaggatgaagaggatcccggcgatgacgaggcctccgatctgcagggactggtagtcgtaagtgaacgggtcgtgttcctttggactttctgccttggccatggtgaggagacccacacagaaaac

SEQ ID NO: 918 - DNA, 391 bp, Homo sapiens
tacactagcatccaaagtttatgaaaaacttccacacactcagtcctcacaacaaccgtgagggaggtaaggcagtgattatgatcccatttcacaggttgaagacaccgaggctcagagaggggaaatgactggcccaaggggacaagacgcatcttaagatgtcaagtcctggacccttccctgcaaggccccctgtggaaggaaatagctctgctggacattcagccactgaagagagcccccagtccagaggcttggagaccactggaggctctggcctggtgaccctgggtctcaagagaaatccgtgcggagagggaggggcttttccattccactgatgaggagctcaggctcttgggacatcgtggaggtactgggcaccgct

SEQ ID NO: 919 - DNA, 412 bp, Homo sapiens; identical to SEQ ID NO: 456

SEQ ID NO: 920 - DNA, 495 bp, Homo sapiens; identical to SEQ ID NO: 166

SEQ ID NO: 921 - DNA, 543 bp, Homo sapiens
tttattttttttttttaccaaaaacgcaggggatttatttgaggtttgggtgaaaaataatcctgtgggtggtggtaggccgacagatggggacaggaagctgtggacgaaagccccaggtcccgtgggagaggtgacagcagcaggggcacgcagccacgtgggtccccaggggaatgtgaaggcggagggctccaggcgaactggggattaaacaaatatttacaggcagcagggaagtgcccagcgcacgtgacgggggcggggcgggactttggggagggcggggctaacggtatcgagcgagccggttgtagacgtggtccaggtttctgcacaggaatatcgagagcgtcatgaacccgagctcgagtaggccgacgcccaggcaaatgcccactatggaaataaggttgttgtgcagccacttctggaggcctgcgcccaccctcgcggtagatgtggctctctgcaggacagcgcaatgtctgcactgtgtctgggacgcgccagtgtccagcctgctgagctgggcaagatcac

SEQ ID NO: 922 - DNA, 369 bp, Homo sapiens
tttttttttttttttaattagattgcattttatttagataaatgaaaatttgccccaaacagaactaggaatcaaatattgtcttggactagaggtaattgctaagctggaagcttatattgaaaactaaaatttccagcccttgactatctgtagttccaaacatcaaaggaaaatattggaacaatttatctatgtacagagagaggcaactcatgggtaccataagcaaaataacctgagggggaacatttgatattacaagaagtggtgagagtttacaagtcttgcattgctttctattgtacatggctctgtagtaatgccaaaaataacaaaatgtaggcacttgctctggacttctgcagt

SEQ ID NO: 923 - DNA, 329 bp, Homo sapiens
  misc_feature: n=a,t,g or c
ccaggtgaacaagtaaatcattggctttattctgggtcctggaagctccactgtnagtntgaaaaaaagacacaacaggggcggcagccnggngggctggtgcagaaaatagtccctggntcctntggccctgggagcctaaagggcagtgaggagaaggnttagcaagaggcctggagcaggggaagtcaggtccctcaggaacccctcctcccccagaggaaggaggaagagggctggagagtctgctggagagtctgctcagttcctcagcaactgcactncaggagggtgcaggccatgggttactccttgcccttntcaggggc

SEQ ID NO: 924 - DNA, 443 bp, Homo sapiens
  misc_feature: n=a,t,g or c
ggaatttattgaaatacagtgtatcatacaaatagaatattcacatgaaatgatcaaaggaaggggtaaggagaaaagtattaaaactgaaaatttacctagtgaataagtggacataacaattgagaatctatccacttcatgtcacttatggaaacaacacattaagattaaactacatgtttgctagagtaggagaaagtatataccacagggaccatcattactctagagtgggtctatgcataactcctcaaaaagagggccatcgttggtgtttatgtggctaaaagttgtgtattttgggcttctggagaaccataaaattggactcaaagaatagtttcaaaggaggtaaaagaaggaaatgncgtggacaattggaaggacatgggaattnaaatgggnttggtcncccaantggccccttaggtaacccagag

SEQ ID NO: 925 - DNA, 363 bp, Homo sapiens; identical to SEQ ID NO: 209

SEQ ID NO: 926 - DNA, 432 bp, Homo sapiens
caaacaattgatttttattgcagtaagagtaacaaggaatcccacccctcacatgccctttgctttatgtaaaaacctgtccagcagaataagcaacagtcaccctcaggaggcgatttagccccaagtgcccatagaacagcctcaggcacgacttctgtgctccctcgctgttcccagagccatctgccaagaccaggaattcacctttggagtctaacttgttttctctttttttcacctctcaaaaaataaaaagccttcagtaatacagcccaaggattacccgtgtgtctaaaagaaggatagattcccataaacaatgttgtcagcttgagtgagggtaaacacagaaaggcacacaataaattaaagcagaccttgactcttcagagggcctggcggtgacgtctggggggggccagatctgcc

SEQ ID NO: 927 - DNA, 163 bp, Homo sapiens; identical to SEQ ID NO: 233
  misc_feature: n=a,t,g or c

SEQ ID NO: 928 - DNA, 231 bp, Homo sapiens; identical to SEQ ID NO: 234

SEQ ID NO: 929 - DNA, 457 bp, Homo sapiens; identical to SEQ ID NO: 241
  misc_feature: n=a,t,g or c

SEQ ID NO: 930 - DNA, 258 bp, Homo sapiens; identical to SEQ ID NO: 474
  misc_feature: n=a,t,g or c

SEQ ID NO: 931 - DNA, 324 bp, Homo sapiens
  misc_feature: n=a,t,g or c
taaatgtacatttactataaaagctgttgcattttagaaaacttgttgtttttattttttactgtttctcagaggcattttagaataaatactttaaatgaaagttagtataaccgatatagaacactggcccacccagagcagtaacatcttttggacggactcacatatgaggtgggatcatttcagtttgttaaatcttacactgcgtataggataactataatatgtattgcattaatcacactacatgggaagggnaatgtcaggggaggttcgcctaggtggaaaaaaccaaaaggttaccccatttatttttattaa

SEQ ID NO: 932 - DNA, 145 bp, Homo sapiens; identical to SEQ ID NO: 478
  misc_feature: n=a,t,g or c

SEQ ID NO: 933 - DNA, 417 bp, Homo sapiens
  misc_feature: n=a,t,g or c
ctactaaaatatattttaatagctggtgttaacaatttgcataacaaaagccaaattatattagtaacattgtaacattccgtgacgccccttcatttgcaaaacattcaatgttttcttcaaaactgttacactctcaacgttagtctcgcaaattaatcatcaaccacaattctacatattttgacgcaaacagacgccaaactgtacaatggttcanttttgatcacaggtcaaacatcangtttcacaccatgcctgtaatagacttggtgctgcttcctaaatgctcagcaattcattacatgggcactggcgactgggactgtgatgcagttttctcttttcctttaaagtccatcattcttaacagcaactggcttncnccgccgcgcnactctgccanactgggatccc

SEQ ID NO: 934 - DNA, 231 bp, Homo sapiens; identical to SEQ ID NO: 256

SEQ ID NO: 935 - DNA, 493 bp, Homo sapiens; identical to SEQ ID NO: 264
  misc_feature: n=a,t,g or c

SEQ ID NO: 936 - DNA, 305 bp, Homo sapiens
  misc_feature: n=a,t,g or c
ttaattatngatattccccctcaccgccctcagggancgggagaagtcacacgaccatagggagcttggacttggtggtcgtcacggtgctggcagacgagggtctttccaggaaccccttgctagaatcagccctcatacaagtgtgctcagagatcccaggagcgatggcatcctcccgaagtcactacccccatatgtctccttgggcttcttccccctctctttctggaacctgaccaggcagaacgcagcaactgncagcaacagcacgcccagggagcaccccaatcagagntccggcc

SEQ ID NO: 937 - DNA, 429 bp, Homo sapiens
  misc_feature: n=a,t,g or c
ttgacgttggcagtgacatttatttttctnnggggaggggagttatatacagcagtgacccggagcccctcacccccaccaggcttaggtggggacaggaggcgttggcagaaggcacacagtggcagtagccagaagaggccaggaagtaagggtgggtatgtgatgtgtcctgggagacccagatgaggaaattgaggctcagtgagggcctcaggtcacacagtaaggtgcgaaggagctagtcccgagagcttgtggtggttgcttctctcttgcctgggctacaggaggacgcaggggcagcccccgcccttcttcctgggggcactgggagggctcggtgggagctcttgttcctggtatttccggacagcccgcaccagctgcttcaaaagcctcgtccacgttgagacgcattttggccga

SEQ ID NO: 938 - DNA, 467 bp, Homo sapiens; identical to SEQ ID NO: 488
  misc_feature: n=a,t,g or c

SEQ ID NO: 939 - DNA, 1364 bp, Homo sapiens; identical to SEQ ID NO: 179

SEQ ID NO: 940 - DNA, 419 bp, Homo sapiens; identical to SEQ ID NO: 185

SEQ ID NO: 941 - DNA, 1021 bp, Homo sapiens; identical to SEQ ID NO: 186

SEQ ID NO: 942 - DNA, 2497 bp, Homo sapiens
gggcgccgaggctccccgccgctcgctgctccccggcccgcgccatgccctcctacacggtcaccgtggccactggcagccagtggttcgccggcactgacgactacatctacctcagcctcgtgggctcggcgggctgcagcgagaagcacctgctggacaagcccttctacaacgacttcgagcgtggcgcggtggattcatacgacgtgactgtggacgaggaactgggcgagatccagctggtcagaatcgagaagcgcaagtactggctgaatgacgactggtacctgaagtacatcacgctgaagacgccccacggggactacatcgagttcccctgctaccgctggatcaccggcgatgtcgaggttgtcctgagggatggacgcgcaaagttggcccgagatgaccaaattcacattctcaagcaacaccgacgtaaagaactggaaacacggcaaaaacaatatcgatggatggagtggaaccctggcttccccttgagcatcgatgccaaatgccacaaggatttaccccgtgatatccagtttgatagtgaaaaaggagtggactttgttctgaattactccaaagcgatggagaacctgttcatcaaccgcttcatgcacatgttccagtcttcttggaatgacttcgccgactttgagaaaatctttgtcaagatcagcaacactatttctgagcgggtcatgaatcactggcaggaagacctgatgtttggctaccagttcctgaatggctgcaaccctgtgttgatccggcgctgcacagagctgcccgagaagctcccggtgaccacggagatggtagagtgcagcctggagcggcagctcagcttggagcaggaggtccagcaagggaacattttcatcgtggactttgagctgctggatggcatcgatgccaacaaaacagacccctgcacactccagttcctggccgctcccatctgcttgctgtataagaacctggccaacaagattgtccccattgccatccagctcaaccaaatcccgggagatgagaaccctattttcctcccttcggatgcaaaatacgactggcttttggccaaaatctgggtgcgttccagtgacttccacgtccaccagaccatcacccaccttctgcgaacacatctggtgtctgaggtttttggcattgcaatgtaccgccagctgcctgctgtgcaccccattttcaagctgctggtggcacacgtgagattcaccattgcaatcaacaccaaggcccgtgagcagctcatctgcgagtgtggcctctttgacaaggccaacgccacagggggcggtgggcacgtgcagatggtgcagagggccatgaaggacctgacctatgcctccctgtgctttcccgaggccatcaaggcccggggcatggagagcaaagaagacatcccctactacttctaccgggacgacgggctcctggtgtgggaagccatcaggacgttcacggccgaggtggtagacatctactacgagggcgaccaggtggtggaggaggacccggagctgcaggacttcgtgaacgatgtctacgtgtacggcatgcggggccgcaagtcctcaggcttccccaagtcggtcaagagccgggagcagctgtcggagtacctgaccgtggtgatcttcaccgcctccgcccagcacgccgcggtcaacttcggccagtacgactggtgctcctggatccccaatgcgcccccaaccatgcgagccccgccaccgactgccaagggcgtggtgaccattgagcagatcgtggacacgctgcccgaccgcggccgctcctgctggcatctgggtgcagtgtgggcgctgagccagttccaggaaaacgagctgttcctgggcatgtacccagaagagcattttatcgagaagcctgtgaaggaagccatggcccgattccgcaagaacctcgaggccattgtcagcgtgattgctgagcgcaacaagaagaagcagctgccatattactacttgtccccagaccggattccgaacagtgtggccatctgagcacactgccagtctcactgtgggaaggccagctgccccagccagatggactccagcctgcctggcaggctgtctggccaggcctcttggcagtcacatctcttcctccgaggccagtacctttccatttattctttgatcttcagggaactgcatagattgtatcaaagtgtaaacaccatagggacccattctacacagagcaggactgcacaggcgtcctgtccacacccagctcagcatttccacaccaagcagcaacagcaaatcacgaccactgatagatgtctattcttgttggagacatgggatgattattttctgttctatttgtgcttagtccaattccttgcacatagtaggtacccaattcaattactattgaatgaattaagaattggttgccataaaaataaatcagttcattt

SEQ ID NO: 943 - DNA, 5508 bp, Homo sapiens
gattttaggtgatgggcaagtcagaaagtcagatggatataactgatatcaacactccaaagccaaagaagaaacagcgatggactcgactggagatcagcctctcggtccttgtcctgctcctcaccatcatagctgtgagaatgatcgcactctatgcaacctacgatgatggtatttgcaagtcatcagactgcataaaatcagctgctcgactgatccaaaacatggatgccaccactgagccttgtagagactttttcaaatatgcttgcggaggctggttgaaacgtaatgtcattcccgagaccagctcccgttacggcaactttgacattttaagagatgaactagaagtcgttttgaaagatgtccttcaagaacccaaaactgaagatatagtagcagtgcagaaagcaaaagcattgtacaggtcttgtataaatgaatctgctattgatagcagaggtggagaacctctactcaaactgttaccagacatatatgggtggccagtagcaacagaaaactgggagcaaaaatatggtgcttcttggacagctgaaaaagctattgcacaactgaattctaaatatgggaaaaaagtccttattaatttgtttgttggcactgatgataagaattctgtgaatcatgtaattcatattgaccaacctcgacttggcctcccttctagagattactatgaatgcactggaatctataaagaggcttgtacagcatatgtggattttatgatttctgtggccagattgattcgtcaggaagaaagattgcccatcgatgaaaaccagcttgctttggaaatgaataaagttatggaattggaaaaagaaattgccaatgctacggctaaacctgaagatcgaaatgatccaatgcttctgtataacaagatgagattggcccagatccaaaataacttttcactagagatcaatgggaagccattcagctggttgaatttcacaaatgaaatcatgtcaactgtgaatattagtattacaaatgaggaagatgtggttgtttatgctccagaatatttaaccaaacttaagcccattcttaccaaatattctgccagagatcttcaaaatttaatgtcctggagattcataatggatcttgtaagcagcctcagccgaacctacaaggagtccagaaatgctttccgcaaggccctttatggtacaacctcagaaacagcaacttggagacgttgtgcaaactatgtcaatgggaatatggaaaatgctgtggggaggctttatgtggaagcagcatttgctggagagagtaaacatgtggtcgaggatttgattgcacagatccgagaagtttttattcagactttagatgacctcacttggatggatgccgagacaaaaaagagagctgaagaaaaggccttagcaattaaagaaaggatcggctatcctgatgacattgtttcaaatgataacaaactgaataatgagtacctcgagttgaactacaaagaagatgaatacttcgagaacataattcaaaatttgaaattcagccaaagtaaacaactgaagaagctccgagaaaaggtggacaaagatgagtggataagtggagcagctgtagtcaatgcattttactcttcaggaagaaatcagatagtcttcccagccggcattctgcagccccccttctttagtgcccagcagtccaactcattgaactatgggggcatcggcatggtcataggacacgaaatcacccatggcttcgatgacaatggcagaaactttaacaaagatggagacctcgttgactggtggactcaacagtctgcaagtaactttaaggagcaatcccagtgcatggtgtatcagtatggaaacttttcctgggacctggcaggtggacagcaccttaatggaattaatacactgggagaaaacattgctgataatggaggtcttggtcaagcatacagagcctatcagaattatattaaaaagaatggcgaagaaaaattacttcctggacttgacctaaatcacaaacaactatttttcttgaactttgcacaggtgtggtgtggaacctataggccagagtatgcggttaactccattaaaacagatgtgcacagtccaggcaatttcaggattattgggactttgcagaactctgcagagttttcagaagcctttcactgccgcaagaattcatacatgaatccagaaaagaagtgccgggtttggtgatcttcaaaagaagcattgcagcccttggctagacttgccaacaccacagaaatggggaattctctaatcgaaagaaaatgggccctaggggtcactgtactgacttgagggtgattaacagagagggcaccatcacaatacagataacattaggttgtcctagaaagggtgtggagggaggaagggggtctaaggtctatcaagtcaatcatttctcactgtgtacataatgcttaatttctaaagataatattactgtttatttctgtttctcatatggtctaccagtttgctgatgtccctagaaaacaatgcaaaacctttgaggtagaccaggatttctaatcaaaagggaaaagaagatgttgaagaatagagttaggcaccagaagaagagtaggtgacactatagtttaaaacacattgcctaactactagtttttacttttatttgcaacatttacagtccttcaaaatccttccaaagaattcttatacacattggggccttggagcttacatagttttaaactcatttttgccatacatcagttattcattctgtgatcatttattttaagcactcttaaagcaaaaaatgaatgtctaaaattgttttttgttgtacctgctttgactgatgctgagattcttcaggcttcctgcaattttctaagcaatttcttgctctatctctcaaaacttggtatttttcagagatttatataaatgtaaaaataataatttttatatttaattattaactacatttatgagtaactattattataggtaatcaatgaatattgaagtttcagcttaaaataaacagttgtgaaccaagatctataaagcgatatacagatgaaaatttgagactatttaaacttataaatcatattgatgaaaagatttaagcacaaactttagggtaaaaattgcgattggacagttgtctagagatatatatacttgtggttttcaaattggactttcaaaattaaatctgtccctgagagtgtctctgataaaagggcaaatctgcacctatgtagctctgcatctcctgtcttttcaggtttgtcatcagatggaaatattttgataataaattgaaattgtgaactcattgctccctaagactgtgacaactgtctaactttagaagtgcatttctgaatagaaatgggaggcctctgatggaccttctagaattataagtcacaaagagttctggaaaagaactgtttactgcttgataggaattcatcttttgaggcttctgttcctctcttttcctgttgtattgactattttcgttcattacttgattaagattttacaaaagaggagcacttccaaaattcttatttttcctaacaaaagatgaaagcagggaatttctatctaaatgatgagtattagttccctgtctcttgaaaaatgcccatttgcctttaaaaaaaaaagttacagaaatactataacatatgtacataaattgcataaagcataagtatacagttcaataaacttaactttaactgaacaatggccctgtagccagcacctgtaagaaacagagcagtaccagcgctctaaaagcacctccttgtcactttattactcccagaacaacaactatcctgacttctaatatcattcactagctttgcctggttttgtcttttatgcagatagaatcaatcagtatgtattcttttgtgcctggcttctttctctcagccttacatttgtgagattcctctgtattgtgctgattgtggatcttttcattctcattgcagaataatgttctattgtgggacttattacaatttgttcatcctattgttgatgggcacttgagaactttccattttggcgctattacaaatagtgcaactatgaatgtactgcatgttaccatcttacttgagcctttaatggacttatttcttcaaatccttccaaaaattattataagcattgaaattatagtttcaagccaactgtggatacccttaccctttcctcctttatcacaaccaccgttacaagtatacttatatttccctaaaatacatttaaaacttacctaagtgacatttgtagttggagtaataggagcttccagctctaataaaacagctgtctctaacttattttatttccatcatgtcagagcaggtgaagagccagaagtgaagagtgactagtacaaattataaaaagccactagactcttcactgttagctttttaaaacattaggctcccatccctatggaggaacaactctccagtgcctggatcccctctgtctacaaatataagattttctgggcctaaaggatagatcaaagtcaaaaatagcaatgcctccctatccctcacacatccagacatcatgaattttacatggtactcttgttgagttctatagagccttctgatgtctctaaagcactaccgattctttggagttgtcacatcagataagacatatctctaattccatccataaatccagttctactatggctgagttctggtcaaagaaagaaagtttagaagctgagacacaaagggttgggagctgatgaaactcacaaatgatggtaggaagaagctctcgacaatacccgttggcaaggagtctgcctccatgctgcagtgttcgagtggattgtaggtgcaagatggaaaggattgtaggtgcaagctgtccagagaaaagagtccttgttccagccctattctgccactcctgacagggtgaccttgggtatttgcaatattcctttgggcctctgcttctctcacctaaaaaaagagaattagattatattggtggttctcagcaagagaaggagtatgtgtccaatgctgccttcccatgaatctgtctcccagttatgaatcagtgggcaggataaactgaaaactcccatttaagtgtctgaatcgagtgagacaaaattttagtccaaataacaagtaccaaagttttatcaagtttgggtctgtgctgctgttactgttaaccatttaagtggggcaaaaccttgctaattttctcaaaagcatttatcattcttgttgccacagctggagctctcaaactaaaagacatttgttattttggaaagaagaaagactctattctcaaagtttcctaatcagaaatttttatcagtttccagtctcaaaaatacaaaataaaaacaaacgtttttaatact

SEQ ID NO: 944 - DNA, 2512 bp, Homo sapiens; identical to SEQ ID NO: 265

SEQ ID NO: 945 - DNA, 3100 bp, Homo sapiens; identical to SEQ ID NO: 267

SEQ ID NO: 946 - DNA, 7720 bp, Homo sapiens
taagttgacacttctcaggttgtcacaagattcaggtatggctcactgttgcaggacataagctgggatctcctgggaattggtctgcttgcaggccctagagagccttccttcttggttgattttcctctagagatccaactgtcttctcaggctcccctgcctgcctcctccttgggtcctttcttgtggcattgccagattactgggcccccattttccctacacttactgccactcatagtctgatggttcccacatctgcatccaacctggactcttcccctgagctttcccctctacaaccaccttccccgggccaagggcacacaggcacctcgacaaaacagtgttctatgtttcttcctgcccaaacctgcccctccctctcccttttcccatctgtggtaccaccatgggctcagagaataaaaaaaatgaaggcttctgtcattgactggggtggagatggagggaagagttagcccagaatcacaggtgctgtagaaaggatacctgagttgccgggagagggggtccatgagttggggatggaaggagagcttggcccttcaaacaattgaagatctgatcaaaagattcagaacatctgtgattttgtggctggtgatgggtgacacctgggctaatggggttgggggagttggtggctctacaatttatggccttgggagatccttgctctctatagctgactgggaggttggaagcctgggctctagcccttgccttgatcctccggatctcattttcctcatctgcctaacaggacagaggggttggaaactgatgagattagctcaaaggatcctggcagctcaggctgcaagatttttttcagacctcagtgtttgggaaaaaattgggtaggtggagcttagggactggccttaggcctgcactgttaattcaccccctcccactaccccatggaggcctggctggtgctcacatacaataattaactgctgagtggccttcgcccaatcccaggctccactcctgggctccattcccactccctgcctgtctcctaggccactaaaccacagctgtcccctggaataaggcaagggggagtgtagagcagagcagaagcctgagccagacggagagccacctcctctcccaggtatgtgacactccccatcccccttcagaggccacacaccctatggcattcccaccatgtgttaaggattttctgaactggaagggccctctgtttgcctgaaggccagagaatcttgaagtggagactgaggcccagaccagagtgtggcctgctcaagattaaacgacaagttagtgttcatccccctgaactagtacctgggctctagcccttcagtccagagctgagttctcagctcttctagtctggggccccaaggttgggtgtgggggtcatgattgttggtggggaggggtcacagctggactaagacctgaaggtgagactaggcaggtgggaaaggagcttgcagagtgatgctgctcaaaaggacaggaagagagcctggcttcagaagcagccacagcaagagagactactgactgaacaggtgggctccactgggggctccggaaaggattttctcagcccccatccccagcactgtgtgttggccgcacccatgagagcctcagcactctgaaggtgcagggggcaaaggccaaaagagctctggcctgaacttgggtggtccctactgtgtgacttggggcatggccctcatctgtgctgaaatgattccacaaagattaaactggctatcatttgttgatttcccccttcttacatttaatccttgcaggagaaagctaagcctcaagatagtttgcttctctttcccccaaggccaaggagaaggtggagtgagggctggggtcgggacaggttgaacgggaaccctgtgctctaaacagttagggtttgttcccgcaggaactgaacccaaaggatcacctggtattccctgagagtacagatttctccggcgtggccctcaaggttagtgagtgagcaggtccacaggggcatgattggatcctggaatgaatgaatcaaccatgagagagtgaatgaacactggaatcaatagagtagcagagtaatggattgtggagcaggaaagagagctgctgggtgggaattcaattccaggcttatatgagccctgctgtgcagtcggcctggagacagcccagctcaggccctgcctagacccctgtcaaggaggccctgtcaagaggagaggaggggcagcacgggggcaaggcaagcttgtgagcgggaaaggcatgtccactttagcgactggtatgtggaagatgagttagaggagacagatggagagaagtcataggaaataaattctgagcattttaggagggcccagacacctggtgtccagtggagtgaaggaaacagtcgcctcccaaaattcagtgtctgaggtcaaaggattgaagttctgtgatgaccaaggagaagccagctctgtggtagggggcacaggagctccccaaggccccagggctgtccagctggctgtcccctgccagcacccatgtcctgtgaccccaccccaccaagatcccatggtttccgggaagggcctactaaactagcttgagtgatgaggctagaaaggggctgggaccaaggtttaaaaagcaaaacaaactaacaaaaaccacactgcagcccccccaactaaaacatttttataaactttttttttttttttgagatggagtctcgctctgtcacccaggctagagtgcaatggcacaatcttggctcactgtaacctccacctcctggattcaagtgattctcctgcctcagcctcccacgtagctgggactacaggcacacgacaccgcacccagctcattttgtatttttagtagagacagggtttcactatgttggccaggctggtctcaaacttctgacctcaggtgatccacccacctcagccttccaaagtgctgggattacaggcatgagccaccgcgcccagcccatttttgtaaacttttacaatgaagtaatttggtgtcaaaatctgacctgaaaattaatgtgagtttatgtatagttttaatttatcccactagtgtaactgtttcaccccagaatatacacttgattattgggtatatgaaaaaaatattttctttgaatcacctttgatgaaatcctaaaaaattttaaccctgaaacatttgaataaggcattgtggacctatggcaaactcctggctatttctgcattttgcccaaatccatccttgaattatatcacctgaacctcgtgaccacctggagaaggcaatgaggctcaagccagggaggggtggtgtctaatcctacctttcattggatctgggaaaactgagggagatgggggcagggctctatctgccccaggcttccgtccaggccccaccctcctggagccctgcacacaacttaaggccccacctccgcattccttggtgccactgaccacagctctttcttcagggacagacatggctcagcggatgacaacacagctgctgctccttctagtgtgggtggctgtagtaggggaggctcagacaaggattgcatgggccaggactgagcttctcaatgtctgcatgaacgccaagcaccacaaggaaaagccaggccccgaggacaagttgcatgagcaggtgggccagggggtgatctggggtggtgagggactggctcaggaagaggaaacgaggacatggaaatgccaaaccccattggcactggtgaactgaagtggaggagcccttcagtttgcattaatatgggtgacttatttcagagacactgtgccaaatgtcggtacaatgccaacagttcaccttcttggttgttgagtttccgcattacagaaataaggaagcaggcccaaaggagagcctgggaaatgaagttggagtgacccatcctggggttgcttgatttagggatttagactgggaatgactcctccaaagatctgagggaagaaactgcacactgtgcatagtggcctcttttctgccagccctaaacagctcaagaagggagagtctctcacattatgaggctgtgtgcaaagcattcttttttttttttcctgagacaaagtctccatatgttgcccaggctggtctcaaattcctggactcaagtgatcctcccacctcagccctcccaaagtgtgggattacagaaatgagccgtacgccctcctgaagcatcttggttcatgcatctcgcaaaactttgggctgtgtctctcgaccacattggacctgaggtctccctataacatttattttgctaccacccctttaatatcctgaacatgatgatataactaaagaaaaagcagaggaaaagtaatttgtaggccaggtgttacggctcacgcctgtaatcccaacactgtgggatgtcgagatgggcagatcacttgagctcaggagttcgagaccagcctgggcaagatggcaaaaccccatctctactaaaaaataaaaaaaattagtcaggtgtggtggcacatgcctgcagtcccagctactcaggaggctgaggtgggcaggtcagttgagcccaggaggcagagattgtagatcgtgccactgcactccagcctgggcaacagagtgagaccttgtcaaaagaaagaaagaacgaaaaaaagaaagaaaggaaggaaggaaggggaggaaggaaagggagggaggaaagggagggaggaaagggagggaggcaagggagagaaacttgtaatacgcatttctttttttttttcttgagatagagttttgctcttgttgcccagggtggatggcagtggcacaatctcagctcactgcaacctccacctcccaggttcaagtgattctcctgcctcagcctcctgagtaggcacacgccaccacacccagctaattttttgtttgtttgtttgttttgtttgttggtatttttagtagagatgggggtttcaccatgttggccaggctggtctcgaactcctcacctcataatccgcccctcttggcctcccaaagtgctgagattacaggtgtgagccactgcgcccggccttaagtgcacattttatttatttatttatttatttatttattgagatggagtcttgctctgttgcccaggctggagtgcagtggcacaatctcagctcactgcaacctccacctcccaggttcaagcaattcttctgccttggcctccagagtagctgggactataggcacctgccaccatgcctagctaatttttgtatttttagtagaaatggggttttgccatgttggccaggctggtctccattcttgaccttaagtgatctgtccacctccacctcccaaagtgctgggattacaggcactatgtgagccactgtgccggcccacattttaatatttagcttgtcagccttaagtaatgagattcaggaagcttgaggataggcacacaggagcatagtttcaagttgtcctgaattttgcagccatcacaagttagtttttaaggaaaaagattagttcctaagttgtttctcaataacttataataaaataacatccacaattgattggctatacattgtttttttgtatcacaaattccacaaacagataatgggtgaggcagctagtcagggacaaaacacttcccaagtagctgggattacaggtgtccgccaccacacttggctagttttttgtttgtttattttttgagatggagtcttgctctgtcgcccaggctggagtgcagtggcatgatctcggctcactgcaagctccacctgccgggttcacaccattctcctgcctcagcctcccaagtagctgggactacaggtgccagccaccacgcccggctaattttttgtatttttagtagagacggggtttcaccatgttggccaggatggtcttgatctcttagcctcgtgatccacccgcctcggcctcccaaaatgctgggattacaggcgtgagccaccgcacccggcctaatttttatatttttagtagagacggggtttcaccatgttggccaggctggtctcaaactcttgatctcaggtgatccacctgccttggcctcccaaagtgctgggattacacaagtaagccactgcacccagcctggggttacaatttaaattgcttttttaccttcaaatctttgacacctcagtgaggcttaatctgaccgcactattacactacaagtccccatccgtctctgcttaatttttgtccaaagcaaaaatcaggtgatgtgttcattgttgtaaccccagtttctacaaaagtacctgggtgagagtaagtaggatctcaataaaggttgaattaacaaattttgtaatgactgcaactccagcaggagctcccttttgggctcccactgtctctgacggccctctcccctaaagaggtcccaatagcaagtattttcctgggtgacttccagtgggctggggaatcaaggactaagaggggagacactgcatgtggaatattctggctgtgctggctgtgctggctgtggactgagtcctctgtcttcccccatccagtgtcgaccctggaggaagaatgcctgctgttctaccaacaccagccaggaagcccataaggatgtttcctacctatatagattcaactggaaccactgtggagagatggcacctgcctgcaaacggcatttcatccaggacacctgcctctacgagtgctcccccaacttggggccctggatccagcaggtatgcatggcttcctgcaggtacaagacctagcggagcagctgagctttccaggcatctctgcaggctgcaaccccagctccagttctattcggggctgagttgctgggattcttgaacctgagcccttcttttgtatcaaaatcacccaggtggatcagagctggcgcaaagagcgggtactgaacgtgcccctgtgcaaagaggactgtgagcaatggtgggaagattgtcgcacctcctacacctgcaagagcaactggcacaagggctggaactggacttcaggtgagggctggggtgggcaggaatggagggatttggaagtggaggtgtgtgggtgtggaacaggtatgtgacaatttggagttgtagggctggcagacctcaagatagttccgggcccagtggctaaaggtcttccctcctctctacagggtttaacaagtgcgcagtgggagctgcctgccaacctttccatttctacttccccacacccactgttctgtgcaatgaaatctggactcactcctacaaggtcagcaactacagccgagggagtggccgctgcatccagatgtggttcgacccagcccagggcaaccccaatgaggaggtggcgaggttctatgctgcagccatgagtggggctgggccctgggcagcctggcctttcctgcttagcctggccctaatgctgctgtggctgctcagctgacctccttttaccttctgatacctggaaatccctgccctgttcagccccacagctcccaactatttggttcctgctccatggtcgggcctctgacagccactttgaataaaccagacaccgcacatgtgtcttgagaattatttgg

SEQ ID NO: 947 - DNA, 1800 bp, Homo sapiens
ggaaggcgcgcctgccgaggcgagctaagcgcccgctcgccatggggagccccgcacatcggcccgcgctgctgctgctgctgccgcctctgctgctgctgctgctgcgcgtcccgcccagccgcagcttcccaggatcgggagactcaccactagaagacgatgaagtcgggtattcacaccctagatataaagataccccgtggtgctcccccatcaaggtgaagtatggggatgtgtactgcagggcccctcaaggaggatactacaaaacagccctgggaaccaggtgcgacattcgctgccagaagggctacgagctgcatggctcttccctactgatctgccagtcaaacaaacgatggtctgacaaggtcatctgcaaacaaaagcgatgtcctacccttgccatgccagcaaatggagggtttaagtgtgtagatggtgcctactttaactcccggtgtgagtattattgttcaccaggatacacgttgaaaggggagcggaccgtcacatgtatggacaacaaggcctggagcggcgccagcctcctgtgtggatatggacctcctagaatcaagtgcccaagtgtgaaggaacgcattgcagaacccaacaaactgacagtccgtgtctgggagacacccgaaggaagagacacagcagatggaattcttactgatgtcattctaaaaggcctccccccaggctccaactttccagaaggagaccacaagatccagtacacagtctatgacagagctgagaataagggcacttgcaaatttcgagttaaagtaagagtcaaacgctgtggcaaactcaatgccccagagaatggttacatgaagtgctccagcgacggtgataattatggagccacctgtgagttctcctgcatcggcggctatgagctccagggtagccctgcccgagtatgtcaatccaacctggcttggtctggcacggagcccacctgtgcagccatgaacgtcaatgtgggtgtcagaacggcagctgcacttctggatcagttttatgagaaaaggagactcctcattgtgtccacacccacagcccgaaacctcctttaccggctccagctaggaatgctgcagcaagcacagtgtggccttgatcttcgacacatcaccgtggtggagctggtgggtgtgttcccgactctcattggcaggataggagcaaagattatgcctccagccctagcgctgcagctcaggctgttgctgcgaatcccactctactccttcagtatggtgctagtggataagcatggcatggacaaagagcgctatgtctccctggtgatgcctgtggccctgttcaacctgattgacacttttcccttgagaaaagaagagatggtcctacaagccgaaatgagccagacctgtaacacctgacatgatggttcctctcttggcaattcctcttcattgtctacatagtgacatgcacacgggaaagccttaaaaatatccttgatgtacagattttatttgtaatttaaaagtctattttattatgagctttcttgcacttaaaaattagcatgctgctttttgtacttggaagtgtttcaaaaaattatatgaccatatttactctttctaactttctttactccatcatggctggttgattttgtagagaaattagaacccataaccatacacaggctatcaacatgttattcaatgtgacacctaactcttttctattttgttttttaagtaagacttttattaataaaacaaaatgttttggaaaaaaaaa

SEQ ID NO: 948 - DNA, 874 bp, Homo sapiens; identical to SEQ ID NO: 285

SEQ ID NO: 949 - DNA, 838 bp, Homo sapiens
gaattccggagttttcatccagccacgggccagcatgtctgggggcaaatacgtagactcggagggacatctctacaccgttcccatccgggaacagggcaacatctacaagcccaacaacaaggccatggcagacgagctgagcgagaagcaagtgtacgacgcgcacaccaaggagatcgacctggtcaaccgcgaccctaaacacctcaacgatgacgtggtcaagattgactttgaagatgtgattgcagaaccagaagggacacacagttttcacggcatttggaaggccagcttcaccaccttcactgtgacgaaatactggttttaccgcttgctgtctgccctctttggcatcccgatggcactcatctggggcatttacttcgccattctctctttcctgcacatctgggcagttgtaccatgcattaagagcttcctgattgagattcagtgcaccagccgtgtctattccatctacgtccacaccgtctgtgacccactctttgaagctgttgggaaaatattcagcaatgtccgcatcaacttgcagaaagaaatataaatgacatttcaaggatagaagtatacctgattttttttccttttaattttcctggtgccaatttcaagttccaagttgctaatacagcaacgaatttatgaattgaattatcttggttgaaaataaaaagatcactttctcagttttcataagtattatgtctcttctgagctatttcatctatttttggcagtctgaatttttaaaacccatttatatttctttccttacctttttatttgcatgtggatcaaccatcgctttatt

SEQ ID NO: 950 - DNA, 2279 bp, Homo sapiens; identical to SEQ ID NO: 269

SEQ ID NO: 951 - DNA, 2834 bp, Homo sapiens; identical to SEQ ID NO: 286

SEQ ID NO: 952 - DNA, 655 bp, Homo sapiens; identical to SEQ ID NO: 212

SEQ ID NO: 953 - DNA, 3128 bp, Homo sapiens; identical to SEQ ID NO: 268

SEQ ID NO: 954 - DNA, 463 bp, Homo sapiens
  misc_feature: n=a,t,g or c
tgcaaatgtccttaactgagaggcactgagcagaaagaagaacacaattgcatctccattatcttcatctgggccaccagataccagccacccactctctcagacaatggcagaaaggacaagccagcccccagggacccggccctgccagcttacctgttggcacacctcccctgagcactgcagcctcaccaactgtctggggtccctgagactgcctgctcacactcacctctgagccttcctgtctgctgttccctctgcctggaacatcctctccactcccccttaagaacccctctaagcagctgtcctggctgactgctaattgggcttttaggattcaagggaaggcatcctggctttgggtggcttcctttgaatggggcaaaagatcnaagtttagggggtctttctctnggttgcttaatcctcaataggaacttggntcccggatgttaca

SEQ ID NO: 955 - DNA, 419 bp, Homo sapiens
  misc_feature: n=a,t,g or c
ggatngncactagaaactgctgctggaaacgggcggcggctccacttagggattcctgaagcagtgtttgtggaagatgtagattctttcatgaagcagcctgggaatgagactgcagatacagtgttaaagaagctggatgaacaataccagaagtataagtttatggaactcaaccttgctcagaaaaaaaggaggctgaaaggtcagattcctgaaattaaacagactttggaaattctgaaatacatgcagaagaaaaaagagtctaccaattcaatggagacgagattcttactggcccgataacctgtactgcaaacttcagtccctcctactgataaagtatgcctatggttgggggctaatgtaatgcttgaatatgatattgatgaagctcaggccttgttgggaaaaga

SEQ ID NO: 956 - DNA, 914 bp, Homo sapiens
  misc_feature: n=a,t,g or c
ggcacgagctgtaaaccaaaagaggttactaagcaaaaccacctaaatttaagttggtgatttaaatgaatctcacattaaaagaaagcttgacagtgttatgaaagccaccagactcagccagtgtgtccccatgggtatccccagccatccttgctcaatccattacttatatactaactacataatgacctgttcaaaccagactctatttaatgaactgtgaatttacacagaggccattttaaatgggtcaccccatttaggattagtggatctcaaattattaaccaaacatcactccatttcaaagtaaaatattccaccagcgatttgatttattggctcttccattgccactgagcaatgcccaggaagcaggcacattgccaaggactgggggcatcttgactaggaagctcctcgtttgtgtgagcgtgggtcagaccgccaaagtaggacttcatcgtttacctacctattatcaatatggtgcttgaatatattcctataactgtagaacagtgtggaaagtgatggtaactttgaagttgttcatgtattattggctttgttttaattgacactagtagagtgtaactggtctgtgtgtagattgaatgcttttcgatgttttggtctcttaaaagttaagatgatagacctcataatgtgctgttattggcagtaagaagaagagaaaggtcttatagcgcgcagcttcgttatggggatatcgtgcgccgcgtttaagggcgggaactcggccgcgatgctgtggagcctctgcagcgtgaagacccgcgctctagccgtaggaagccttgggacaggntggtggagatacgcaggtgttcttagagccaaacgtgtgttcgcatagggctgcttcggttgcacatctgggcaccgaa

SEQ ID NO: 957 - DNA, 335 bp, Homo sapiens
ggtggattttcctacagctattggtatggtggtagaaagagatgacggaagcacattaatggaaatagatggcgataaggcaaacaaggcggtccacctactacatagatactaatgctctgcgtgttccgagggagaatatgaggccatttcacctctaaaaaatgggatggttgaagactggatagtttccaagctattttggatcatacctacaaaatgcatgtcaaatcagaagccagtctccatcctgttctcatgtcagaggcaccctggaatactagagcaaagagagagaaactaacagatttaatgtgtgacactacaacatccct

SEQ ID NO: 958 - DNA, 324 bp, Homo sapiens
cctcggtcttgggctccactgggcccctggctccgggagcggcccctggctatgcacccccaccattcctacacatcttgccagcccaccagcagccccactcacagctgctgcaccaccaccttccgcaggatgcacagagtggctcgggtcagcgcaccagcccagctccctgcagcccaagtctcaagcctccaaacctgcctacggaactctccatactggacaaactaaacccagaagagaggggtgggctggggcaaggcttatcctgggcaggagagaacacacgagcacgtatttgggagcccagtgccctttcct

SEQ ID NO: 959 - DNA, 427 bp, Homo sapiens
catttttatcagtattgtgaataaacttgaacacaaatacacgagttccatgtcatgtcttcagttgtagaagtttttcctctttaaggtaaagcgaccaacttgaactttctctggcaacacgattcgcagttatataagggaatcagtgttcacgtctctgtatatatttatttatgtgtaatttaatgggaattgtaaatatggtgagtctgttttaagccttttttttttttatttatctgatcttgtttacctcttgtttagtgggttttgaatcttccctattagttcttcatgtggttcatggtactgatttagaaatccagtgtttgggggatttttttctctgggattcatgaatttagccctgttgtagcatggtaaaggtgacaaacagctggacaaatttttaaaaagtaaaata

SEQ ID NO: 960 - DNA, 2061 bp, Homo sapiens
atgacgcccgccctcacagccctgctctgccttgggctgagtctgggccccaggacccgcgtgcaggcagggcccttccccaaacccaccctctgggctgagccaggctctgtgatcagctgggggagccccgtgaccatctggtgtcaggggagcctggaggcccaggagtaccaactggataaagagggaagcccagagcccttggacagaaataacccactggaacccaagaacaaggccagattctccatcccatccatgacacagcaccatgcagggagataccgctgccactattacagctctgcaggctggtcagagcccagcgaccccctggagctggtgatgacaggagcctatagcaaacccaccctctcagccctgcccagccctgtggtggcctcaggggggaatatgaccctccgatgtggctcacagaagagatatcaccattttgttctgatgaaggaaggagaacaccagctcccccggaccctggactcacagcagctccacagtggggggttccaggccctgttccctgtgggccccgtgaaccccagccacaggtggaggttcacatgctattactattatatgaacaccccccgggtgtggtcccaccccagtgaccccctggagattctgccctcaggcgtgtctaggaagccctccctcctgaccctgcagggccctgtcctggcccctgggcagagcctgaccctccagtgtggctctgatgtcggctacgacagatttgttctgtataaggagggggaacgtgacttcctccagcgccctggccagcagccccaggctgggctctcccaggccaacttcaccctgggccctgtgagcccctccaatgggggccagtacaggtgctacggtgcacacaacctctcctccgagtggtcggcccccagcgaccccctgaacatcctgatggcaggacagatctatgacaccgtctccctgtcagcacagccgggccccacagtggcctcaggagagaacgtgaccctgctgtgtcagtcatggtggcagtttgacactttccttctgaccaaagaaggggcagcccatcccccactgcgtctgagatcaatgtacggagctcataagtaccaggctgaattccccatgagtcctgtgacctcagcccacgcggggacctacaggtgctacggctcacgcagctccaacccctacctgctgtctcaccccagtgagcccctggagctcgtggtctcaggacactctggaggctccagcctcccacccacagggccgccctccacacctggtctgggaagatacctggaggttttgattggggtctcggtggccttcgtcctgctgctcttcctcctcctcttcctcctcctccgacgtcagcgtcacagcaaacacaggacatctgaccagagaaagactgatttccagcgtcctgcaggggctgcggagacagagcccaaggacaggggcctgctgaggaggtccagcccagctgctgacgtccaggaagaaaacctctatgctgccgtgaaggacacacagtctgaggacggggtggagctggacagtcagagcccacacgatgaagacccccaggcagtgacgtatgccccggtgaaacactccagtcctaggagagaaatggcctctcctccctcctcactgtctggggaattcctggacacaaaggacagacaggtggaagaggacaggcagatggacactgaggctgctgcatctgaagcctcccaggatgtgacctacgcccagctgcacagcttgacccttagacggaaggcaactgagcctcctccatcccaggaaggggaacctccagctgagcccagcatctacgccactctggccatccactagcccggggggtacgcagaccccacactcagcagaaggagactcaggactgctgaaggcacgggagctgcccccagtggacaccagtgaaccccagtcagcctggacccctaacacagaccatgaggagacgctgggaacttgtgggactcacctgactcaaagatg

SEQ ID NO: 961 - DNA, 2697 bp, Homo sapiens
gctgagcagtcaacagcatttcttgttccaagatcacccttctgagtacctctctggctgccaaattgccagggccttcacagtttgattccattctcagctccaagcattaggtaaacccaccaagcaatcctagcctgtgatggcgtttgacgtcagctgcttcttttgggtggtgctgttttctgccggctgtaaagtcatcacctcctgggatcagatgtgcattgagaaagaagccaacaaaacatataactgtgaaaatttaggtctcagtgaaatccctgacactctaccaaacacaacagaatttttggaattcagctttaattttttgcctacaattcacaatagaaccttcagcagactcatgaatcttacctttttggatttaactaggtgccagattaactggatacatgaagacacttttcaaagccatcatcaattaagcacacttgtgttaactggaaatcccctgatattcatggcagaaacatcgcttaatgggcccaagtcactgaagcatcttttcttaatccaaacgggaatatccaatctcgagtttattccagtgcacaatctggaaaacttggaaagcttgtatcttggaagcaaccatatttcctccattaagttccccaaagacttcccagcacggaatctgaaagtactggattttcagaataatgctatacactacatctctagagaagacatgaggtctctggagcaggccatcaacctaagcctgaacttcaatggcaataatgttaaaggtattgagcttggggcttttgattcaacggtcttccaaagtttgaactttggaggaactccaaatttgtctgttatattcaatggtctgcagaactctactactcagtctctctggctgggaacatttgaggacattgatgacgaagatattagttcagccatgctcaagggactctgtgaaatgtctgttgagagcctcaacctgcaggaacaccgcttctctgacatctcatccaccacatttcagtgcttcacccaactccaagaattggatctgacagcaactcacttgaaagggttaccctctgggatgaagggtctgaacttgctcaagaaattagttctcagtgtaaatcatttcgatcaattgtgtcaaatcagtgctgccaatttcccctcccttacacacctctacatcagaggcaacgtgaagaaacttcaccttggtgttggctgcttggagaaactaggaaaccttcagacacttgatttaagccataatgacatagaggcttctgactgctgcagtctgcaactcaaaaacctgtcccacttgcaaaccttaaacctgagccacaatgagcctcttggtctccagagtcaggcattcaaagaatgtcctcagctagaactcctcgatttggcatttacccgcttacacattaatgctccacaaagtcccttccaaaacctccatttccttcaggttctgaatctcacttactgcttccttgataccagcaatcagcatcttctagcaggcctaccagttctccggcatctcaacttaaaagggaatcactttcaagatgggactatcacgaagaccaacctacttcagactgtgggcagcttggaggttctgattttgtcctcttgtggtctcctctctatagaccagcaagcattccacagcttgggaaaaatgagccatgtagacttaagccacaacagcctgacatgcgacagcattgattctcttagccatcttaagggaatctacctcaatctggctgccaacagcattaacatcatctcaccccgtctcctccctatcttgtcccagcagagcaccattaatttaagtcataaccccctggactgcacttgctcgaatattcatttcttaacatggtacaaagaaaacctgcacaaacttgaaggctcggaggagaccacgtgtgcaaacccgccatctctaaggggagttaagctatctgatgtcaagctttcctgtgggattacagccataggcattttctttctcatagtatttctattattgttggctattctgctattttttgcagttaaataccttctcaggtggaaataccaacacatttagtgctgaaggtttccagagaaagcaaataagtgtgcttagcaaaattgctctaagtgaaggaactgtcatctgctggtgaccagaccagacttttcagattgcttcctggaactgggcagggactcactgtgcttttctgagcttcttactcctgtgagtcccagagctaaagaaccttctaggcaagtacaccgaatgactcagtccagagggtcagatgctgctgtgagaggcacagagccctttccgcatgtggaagagtgggaggaagcagagggagggactgggcagggactgccggccccggagtctcccacagggaggccattccccttctactaccgacatccctcccagcaccacacaccccgcccctgaaaggagatcatcagcccccacaatttgtcagagctgaagccagcccactacccacccccactacagcattgtgcttgggtctgggttctcagtaaatgtagccatttgagaaacttacttggggacaaagtctcaatccttattttaaatgaaaaaagaaaagaaaagcataataaatttaaaagaaaagg

SEQ ID NO: 962 - DNA, 492 bp, Homo sapiens; identical to SEQ ID NO: 46
  misc_feature: n=a,t,g or c

SEQ ID NO: 963 - DNA, 894 bp, Homo sapiens
cagtctcaatgggggcactggggctggagggcaggggtgggaggctccaggggaggggttccctcctgctagctgtggcaggagccacttctctggtgaccttgttgctggcggtgcctatcactgtcctggctgtgctggccttagtgccccaggatcagggaggactggtaacggagacggccgaccccggggcacaggcccagcaaggactggggtttcagaagctgccagaggaggagccagaaacagatctcagccccgggctcccagctgcccacctcataggcgctccgctgaaggggcaggggctaggctgggagacgacgaaggaacaggcgtttctgacgagcgggacgcagttctcggacgccgaggggctggcgctcccgcaggacggcctctattacctctactgtctcgtcggctaccggggccgggcgccccctggcggcggggacccccagggccgctcggtcacgctgcgcagctctctgtaccgggcggggggcgcctacgggccgggcactcccgagctgctgctcgagggcgccgagacggtgactccagtgctggacccggccaggagacaagggtacgggcctctctggtacacgagcgtggggttcggcggcctggtgcagctccggaggggcgagagggtgtacgtcaacatcagtcaccccgatatggtggacttcgcgagagggaagaccttctttggggccgtgatggtggggtgagggaatatgagtgcgtggtgcgagtgcgtgaatattgggggcccggacgcccaggaccccatggcagtgggaaaaatgtaggagactgtttggaaattgattttgaacctgatgaaaataaagaatggaaagcttcagtgctgccgataaa

SEQ ID NO: 964 - DNA, 7011 bp, Homo sapiens
cgggccgcatcagccctcctcctgtttgcgctccccagcgtgcaatttatttggggggctaccggggattgaacggagcgggcgagcgctgccaggaggtggggccggccccacctgtcgactgcccgtagtaggcagggagagggcggggtttgtcccatagggcccgccccccagtccctgggtcccgggcgcgcgacgagatataaggcagtcaggaaacaatgcgcctgcagctcgcgctcccgcgccgatcccgagagcgtccgggccgccgtgcgcgagcgagggagggcgcgcgcgcggggggggcgcgctcgtgagtgcgggccgcgctctcggcggcgcgcatgtgcgtgtgtgctggctgccgggctgccccgagccggcggggagccggtccgctccaggtggcgggcggctggagcgaggtgaggctgcgggtggccagggcacgggcgcgggtcccgcggtgcgggctggctgcaggctgccttctgggcacggcgcgcccccgcccggccccgccgggccctgggagctgcgctccgggcggcgctggcaaagtttgctttgaactcgctgcccacagtcgggtccgcgcgctgcgattggcttcccctaccactctgacccggggcccggcttcccgggacgcgaggactgggcgcaggctgcaagctggtggggttggggaggaacgagagcccggcagccgactgtgccgagggacccggggacacctccttcgcccggccggcacccggtcagcacgtccccccttccctcccgcagggagcggacatggactacgactcgtaccagcactatttctacgactatgactgcggggaggatttctaccgctccacggcgcccagcgaggacatctggaagaaattcgagctggtgccatcgccccccacgtcgccgccctggggcttgggtcccggcgcaggggacccggcccccgggattggtcccccggagccgtggcccggagggtgcaccggagacgaagcggaatcccggggccactcgaaaggctggggcaggaactacgcctccatcatacgccgtgactgcatgtggagcggcttctcggcccgggaacggctggagagagctgtgagcgaccggctcgctcctggcgcgccccgggggaacccgcccaaggcgtccgccgccccggactgcactcccagcctcgaagccggcaacccggcgcccgccgccccctgtccgctgggcgaacccaagacccaggcctgctccgggtccgagagcccaagcgactcgggtaaggacctccccgagccatccaagagggggccaccccatgggtggccaaagctctgcccctgcctgaggtcaggcattggctcttctcaagctcttgggccatctccgcctctctttggctgaagctgcccgtgtagtccccaaccgtgtctgtctggcacgtgggtgtgttggtaaacagtttggaaaagtggcgtgggagccagcctccctttgatgattattggagccccaggggacaagggatttgaggtgagggttggcgcttagagaggacaatactggggttggactgtaagggattgaagggggtaccttaagagacactccaaacctgaagtttttttgctgctgcctctttccctaggaaactcacactcccctagggggagaagaagccgagagccttttgtgcaaagccaaaaccttcgtccttttaaaaacctaggtctccagttggctttactttaaaatgccaataataaatgccctcttctcgtgcctccccaccaccacttaccactcgtgcatccctgagacagggagggaagaatgaacactccccattaacagatggaaaaactgaggcttagagatagacaatcactacaagtcagctccagctttctgccatctagccagcccctcttccccaatgctccatcccaaccaggcacctcttccttgatgtttggggtctttgtggtagcttatcttagaagcactacaccttgccttgctgtttgtcctgagatggaaaagtgtccttcttgctccccctcaatagatctccagcgtcagctgctccctggcattcaacaaatattcactggcccctactttgtggcaatctgtgggctacatgctggggtcaaggcagtagaactccaggccctcctctcccatccttgatgcaagtgcaacctcgctgagggcagactggggcatcctgtgccactaaactacattgttcttattctggcatcttagacctccacacccgtgagaaatcctggagagggtatttttgtagagtgtagactgtggctagtgacaaataaattaggaccaagaaagctcactgtagcttttaggaataacttttacacgaccatttgatagggaactggggaatggggtatggaagttttcctacacttgagagaaaaaataggataacaaaaattaaaagtctttttttcctggtccactgtgttaaggtcatttttaaccagcttgctttctacaccaagagtttatgtttgtttaatggctggaaagagaatcttgagatcaaaaaaccaataaagatgtatctctacaacggctggtggagtggtagagtggaaagagcattgctttggaagttggaacattttagtttgagatccagaacgttacaaaggtgatatgtggacttcgctgatctgggcctcagtttccccatttgcacacgatggggttggacttgattgtcctgctgatgacatttccttgtctggatagagtaagacactactctctgaaagggagaatggtgtgcttaaattatttctttcttagatagaatcttcctgagccacgaggcttaacactgaaaattaaaggtttgggatgtaggaaagcctgctgaatcattttctaacctaccctttaacctgaacctgtttgtgagcttctagttcactcacaggccacatggcctggaacaaaatgcaacagattgcaaacaatgaggcggggggtggggaaagtgattggcagcagagctcacccaataggggctaggggctgggtaagacagaattccaaacacagcgtaatcagccaatcatgggctttggggccaggagggctgaatggtcaggtttattaatggagaaataatgcgattgtccacacaatggaagccttcctgacaaaggggctcaagcttcctgatatgcaaagaagctgagaacggagctcttcctttgccgaggccgagatccattaaggtcggacttctgtgtggaggctgcaaaatgtgtggagcaggaggagacttttctcccaattgcccctctcctggttaggttaacctaagagaccttcaagccagtgaatgagaagggcgtgtccaggtgtctccaggtctctggtgttatgagccccatatctgggacattctgctgcccagtctctgcctctggtgcaggtagtttggaaatggtcgcttgtacctttgtgaagttcctgcagcttcgccgacctatgattacaaatctaaccttctagtccagggaaggaggtggggcaggcgacctataaatgatggatgactttagaaacccattgaacccaggagcaaaatgctcctaagggaaaccctttccctcccctctgtgggtgaagagggatgggttgtagccctcccttctctgaatcttcagctgaaagggatggcagaatagagaggtgggggaataataggatttataacttgtgaaaagtaacaattccccaagtgcaggctgtgctgggcaggaacaaagggcagctctgcccacagacccctcatttacaattctgatggggcatgaaagagcccgactggggaagatctttatagctaaactttgtcccaggccggtagctctttctctccaacccctccgtgggggaggggagagcctttgcagactgggggctgttggcttgggtctgccttttgttcttatctaagccttgctgtgcaaaaggaaattggagaatattttccttcttgctaatgtcccctcctttccttcactgtgcccttaccacattacaaatgaatcagctttctgctcacctcgatttgtatatatctaaattggaaaaatgtctcctaccttcccaagcaccagcgtagacagctaaagctgtagggtctatgtttgtgtttctcatgggatgtgtttcttctcttgatctcttttctcggacagagaatgaagaaattgatgttgtgacagtagagaagaggcagtctctgggtattcggaagccggtcaccatcacggtgcgagcagaccccctggatccctgcatgaagcatttccacatctccatccatcagcaacagcacaactatgctgcccgttttcctccagaaagctgctcccaagaagaggcttcagagaggggtccccaagaagaggttctggagagagatgctgcaggggaaaaggaagatgaggaggatgaagagattgtgagtcccccacctgtagaaagtgaggctgcccagtcctgccaccccaaacctgtcagttctgatactgaggatgtgaccaagaggaagaatcacaacttcctggagcgcaagaggcggaatgacctgcgttcgcgattcttggcgctgagggaccaggtgcccaccctggccagctgctccaaggcccccaaagtagtgatcctaagcaaggccttggaatacttgcaagccctggtgggggctgagaagaggatggctacagagaaaagacagctccgatgccggcagcagcagttgcagaaaagaattgcatacctcagtggctactaactgaccaaaaagcctgacagttctgtcttacgaagacacaagtttattttttaacctccctctcccctttagtaatttgcacattttggttatggtgggacagtctggacagtagatcccagaatgcattgcagccggtgcacacacaataaaggcttgcattcttggaaaccttgaaacccagctctccctcttccctgactcatgggagtgctgtatgttctctggcgcctttggcttcccagcaggcagctgactgaggagccttggggtctgcctagctcactagctctgaagaaaaggctgacagatgctatgcaacaggtggtggatgttgtcaggggctccagcctgcatgaaatctcacactctgcatgagctttaggctaggaaaggatgctcccaactggtgtctctggggtgatgcaaggacagctgggcctggatgctctccctgaggctcctttttccagaagacacacgagctgtcttgggtgaagacaagcttgcagacttgatcaacattgaccattacctcactgtcagacactttacagtagccaaggagttggaaacctttatgtattatgatgttagctgacccccttcctcccactcccaatgctgcgaccctgggaacacttaaaaagcttggcctctagattctttgtctcagagccctctgggctctctcctctgagggagggacctttctttcctcacaagggacttttttgttccattatgccttgttatgcaatgggctctacagcaccctttcccacaggtcagaaatatttccccaagacacagggaaatcggtcctagcctggggcctggggatagcttggagtcctggcccatgaacttgatccctgcccaggtgttttccgaggggcacttgaggcccagtcttttctcaaggcaggtgtaagacactcagagggagaactgtactgctgcctctttcccaccttcctcatctcaatccttgagcggcaagtttgaagttcttctggaaccatgcaaatctgtcctcctcatgcaattccaaggagcttgctggctctgcagccacctctgggccccttccagcctgccatgaatcagatatctttcccagaatctgggcgtttctgaagttttggggagagctgttgggactcatccagtgctccagaaggtggacttgcttctggggggttttaaaggagcctccaggagatatgcttagccaaccatgatggattttaccccagctggactcggcagctccaagtggaatccacgtgcagcttctagtctgggaaagtcacccaacctagcagttgtcatgtgggtaacctcaggcacctctaagcctgtcctggaagaaggaccagcagcccctccagaactctgcccaggacagcaggtgcctgctggctctgggtttggaagtttggggtgggtagggggtggtaagtactatatatggctctggaaaaccagctgctacttccaaatctattgtccataatggtttctttctgaggttgcttcttggcctcagaggaccccaggggatgtttggaaatagcctctctacccttctggagcatggtttacaaaagccagctgacttctggaattgtctatggaggacagtttgggtgtaggttactgatgtctcaactgaatagcttgtgttttataagctgctgttggctattatgctgggggagtcttttttttttatattgtatttttgtatgccttttgcaaagtggtgttaactgtttttgtacaaggaaaaaaactcttggggcaatttcctgttgcaagggtctgatttattttgaaaggcaagttcacctgaaattttgtatttagttgtgattactgattgcctgattttaaaatgttgccttctgggacatcttctaataaaagatttctcaaacatgtcagagtgggggcagcttatgccacctgagtcctcctcaaccacggaaaactatttcagggtagccacaagtgatccagagggctgcacttctctaaccatgttgctaacctggtcattccactctgggttcctgaaatgccatttcagacatgttgaaacaatgtaggctcagtactcagtgaacacggaattc

SEQ ID NO: 965 - DNA, 3175 bp, Homo sapiens
tgcttaaaaaaacacaacaggattttcgaagaatcctttcttagaaaacaaacaaaaaaaccaaacaaaaacgtactttctccccactagtttacaccacaggaagcgagagagctgctgccactgctgctaccacaggaagacacagcagggagaagccctagtgcctctgccggctgcccaggacctggtatcggcccacagaccaagtcctccacagagggcgagccagggtggagaagagccagcccagtgacccaaacatccccgataaaacacccactgcttaagaggcaggctcggatggactatagctttgataccacagccgaagacccttgggttaggatttctgactgcatcaaaaacttatttagccccatcatgagtgagaaccatggccacatgcctctacagcccaatgccagcctgaatgaagaagaagggacacagggccacccagatgggaccccaccaaagctggacaccgccaatggcactcccaaagtttacaagtcagcagacagcagcactgtgaagaaaggtcctcctgtggctcccaagccagcctggtttcgccaaagcttgaaaggtttgaggaatcgtgcttcagagccaagagggctccctgatcctgccttgtccacccagccagcacctgcttccagggagcacctaggatcacacatccgggcctcctcctcctcctcctccatcaggcagagaatcagctcctttgaaacctttggctcctctcaactgcctgacaaaggagcccagagactgagcctccagccctcctctggggaggcagcaaaacctcttgggaagcatgaggaaggacggttttctggactcttggggcgaggggctgcacccactcttgtgccccagcagcctgagcaagtactgtcctcggggtcccctgcagcctccgaggccagagacccaggtgtgtctgagtcccctcccccagggcggcagcccaatcagaaaactttcccccctggcccggacccgctcctaaggctgctgtcaacacaggctgaggaatctcaaggcccagtgctcaagatgcctagccagcgagcacggagcttccccctgaccaggtcccagtcctgtgagacgaagctacttgacgaaaagaccagcaaactctattctatcagcagccaagtgtcatcggctgtcatgaaatccttgctgtgccttccatcttctatctcctgtgcccagactccctgcatccccaaggcaggggcatctccaacatcatcatccaacgaagactcagctgcaaatggttctgctgaaacatctgccttggacacggggttctcgctcaacctttcagagctgagagaatatacagagggtctcacggaagccaaggaagacgatgatggggaccacagttcccttcagtctggtcagtccgttatctccctgctgagctcagaagaattaaaaaaactcatcgaggaggtgaaggttctggatgaagcaacattaaagcaattagacggcatccatgtcaccatcttacacaaggaggaaggtgctggtcttgggttcagcttggcaggaggagcagatctagaaaacaaggtgattacggttcacagagtgtttccaaatgggctggcctcccaggaagggactattcagaagggcaatgaggttctttccatcaacggcaagtctctcaaggggaccacgcaccatgatgccttggccatcctccgccaagctcgagagcccaggcaagctgtgattgtcacaaggaagctgactccagaggccatgcccgacctcaactcctccactgactctgcagcctcagcctctgcagccagtgatgtttctgtagaatctacagcagaggccacagtctgcacggtgacactggagaagatgtcggcagggctgggcttcagcctggaaggagggaagggctccctacacggagacaagcctctcaccattaacaggattttcaaaggagcagcctcagaacaaagtgagacagtccagcctggagatgaaatcttgcagctgggtggcactgccatgcagggcctcacacggtttgaagcctggaacatcatcaaggcactgcctgatggacctgtcacgattgtcatcaggagaaaaagcctccagtccaaggaaaccacagctgctggagactcctaggcaggacatgctgaagccaaagccaataacacacagctaacacacagctcccataaccgctgattctcagggtctctgctgccgccccacccagatgggggaaagcacaggtgggcttcccagtggctgctgcccaggcccagaccttctaggacgccacccagcaaaaggttgttcctaaaataagggcagagtcacactggggcagctgatacaaattgcagactgtgtaaaaagagagcttaatgataatattgtggtgccacaaataaaatggatttattagaattccatatgacattcatgcctggcttcgcaaaatgtttcaagtactgtaactgtgtcatgattcacccccaaacagtgacatttatttttctcatgaatctgcaatgtgggcagagattggaatgggcagctcatctctgtcccacttggcatcagctggcgtcatgcaaagtcatgcaaaggctgggaccacctgagatcattcactcatacatctggccgttgatgttggctgggaactcacctggggctgctggcctgaatgcttataggtggcctctccttgtggcctgggctcctcacaacatggtgtctggattcccaggatgagcatcccaggatcgcaagagccacgtagaagctgcatcttgtttatacctttgccttggaagttgcatggcatcacctccaccatactccatcagttagagctgacacaaacctgcctgggtttaaggggagaggaaatattgctggggtcatttatgaaaaatacagtttgtcacatgaaacatttgcaaaattgtttttggttggattggagaagtaatcctagggaagggtggtggagccagtaaatagaggagtacaggtgaagcaccaagctcaaagcgtggacaggtgtgccgacagaaggaaccagcgtgtatatgagggtatcaaataaaattgctactacttacctacc

SEQ ID NO: 966 - DNA, 2838 bp, Homo sapiens; identical to SEQ ID NO: 700

SEQ ID NO: 967 - DNA, 401 bp, Homo sapiens
  misc_feature: n=a,t,g or c
aaaccccagcgcagtnctcttcctcctgctactctggctcccagataccaccggagaaattgtgttgacgcagctccaggcaccctgtctttgtctccaggggaaagagccaccctctcctgcagggccagtcagagtgttagcagcagctacttagcctggtaccagcagaaacctgggccaggctcccaggctcctcatctatggtgcatccagcagggccactggcattcccagacaggttcagtggcagtgggtctggggacagatttcactcttcaccattcagcagactgggagcctgaagatttttgcagtgtatttactgttcagcagtattggtagctcaccgttcacttttcgggcggagggaccaaggttggagatcaaacgaatttttg

SEQ ID NO: 968 - DNA, 316 bp, Homo sapiens
  misc_feature: n=a,t,g or c
tgaaaggggtttatttctggtgcacacaattgcttcattgtgaatatacatgtgattctctgtacacaggaaatggaattatgttcaaaataatagacacagcaaacaagtttctttgaagttactaaaaattaatgactacataaaataaacattctaaaactaagtaagtattattaatttgaatagttagtaggtgtaagggaaaaggcatcacactacaataaacaaacaaaaaccaacatggcattcctcgcattagggtaaaggcaccttcnaaatatttttctcttttatacttttttttttaattgtg

SEQ ID NO: 969 - DNA, 498 bp, Homo sapiens; identical to SEQ ID NO: 562

SEQ ID NO: 970 - DNA, 1234 bp, Homo sapiens
tagttcaagacaacagagacaaagctaagatgaggaagttctgtacagtttaggaaatagaggctttcaaagataattcgcagtgatgtgaaactggcctcccaagccctgataacaacatggccaacgccctggccagcgccacttgcgagcgctgcaagggcggctttgcgcccgctgagaagatcgtgaacagtaatggggagctgtaccatgagcagtgtttcgtgtgcgctcagtgcttccagcagttcccagaaggactcttctatgagtttgaaggaagaaagtactgtgaacatgactttcagatgctctttgccccttgctgtcatcagtgtggtgaattcatcattggccgagttatcaaagccatgaataacagctggcatccggagtgcttccgctgtgacctctgccaggaagttctggcagatatcgggtttgtcaagaatgctgggagacacctgtgtcgcccctgtcataatcgtgagaaagccagaggccttgggaaatacatctgccagaaatgccatgctatcatcgatgagcagcctctgatattcaagaacgacccctaccatccagaccatttcaactgcgccaactgcgggaaggagctgactgccgatgcacgggagctgaaaggggagctatactgcctcccatgccatgataaaatgggggtccccatctgtggtgcttgccgacggcccatcgaagggcgcgtggtgaacgctatgggcaagcagtggcatgtggagcattttgtttgtgccaagtgtgagaaaccctttcttggacatcgccattatgagaggaaaggcctggcatattgtgaaactcactataaccagctatttggtgatgtttgcttccactgcaatcgtgttatagaaggtgatgtggtctctgctcttaataaggcctggtgcgtgaactgctttgcctgttctacctgcaacactaaattaacactcaagaataagtttgtggagtttgacatgaagccagtctgtaagaagtgctatgagatttccattggagctgaagaaaagacttaagaaactagctgagaccttaggaaggaaataagttcctttattttttcttttctatgcaagataagagattaccaacattacttgtcttgatctacccatatttaaagctatatctcaaagcagttgagagaagaggacctatatgaatggttttatgtcatttttttaaa

SEQ ID NO: 971 - DNA, 571 bp, Homo sapiens
gttccatttctatgggtttggacaccgatgtagattatgaaactgcatttattcattaccgtctggcttctgagcagcaacacagtgcacaagctatgtttaatctgggatatatgcatgagaaaggactgggcattaaacaggatattcaccttgcgaaacgtttttatgacatggcagctgtaagccagcccagatgcacaagttccagtcttcctagccctctgcaaattgggcatcgtctatttcttgcagtacatacgggaaacaaacattcgagatatgttctcccaacttgatatggaccagcttttgggacctgagtgggacctttacctcatgaccatcattgcgctctgttgggaagtcatagcttacaggcaaaggcagcaccaagacatgcctgcacccaggcctccagggccacggccagctccaccccagcaggaggggccaccagagcagcagccaccacagtaataggcactgggtccagccttgatcagtgacagcgaaggaagttatctgctgggaacacttgcatttgatttaggaccttggggatccgatg

SEQ ID NO: 972 - DNA, 1505 bp, Homo sapiens
  misc_feature: n=a,t,g or c
tttacagggcataactcattttatccttaccacaatcctatgaagtaggaacttttataaaacgcattttatatncaagggcacagagaggntaattaacttgccctctggtcacacagctaggaagtgggcagagtacagatttacactaggcatccgtctcctgnccccacatanccagctgctgtaaacccataccggcggccaagcagcctcaatttgtgcatgcacccacttcccagcaagacagcagctcccaagttcctcctgtttagaattttagaagcggcgggccaccaggctgcagtctcccttgggtcaggggtcctggttgcactccgtgctttgcacaaagcaggctctccatttttgttaaatgcacgaatagtgctaagctgggaagttcttcctgaggtctaacctctagctgctcccccacagaagagtgcctgcggccagtggccaccaggggtcgccgcagcacccagcgctggagggcggagcgggcggcagacccggagcagcatgtggactctcgggcgccgcgcagtagccggcctcctggcgtcacccagcccggcccaggcccagaccctcacccgggtcccgcggccggcagagttggccccactctgcggccgccgtggcctgcgcaccgacatcgatgcgacctgcacgccccgccgcgcaagttcgaaccaacgtggcctcaaccagatttggaatgtcaaaaagcagagtgtctatttgatgaatttgaggaaatctggaactttgggccacccaggctctctagatgagaccacctatgaaagactagcagaggaaacgctggactctttagcagagttttttgaagaccttgcagacaagccatacacgtttgaggactatgatgtctcctttgggagtggtgtcttaactgtcaaactgggtggagatctaggaacctatgtgatcaacaagcagacgccaaacaagcaaatctggctatcttctccatccagtggacctaagcgttatgactggactgggaaaaactgggtgttctcccacgacggcgtgtccctccatgagctgctggccgcagagctcactaaagccttaaaaaccaaactggacttgtcttggttggcctattccggaaaagatgcttgatgcccagccccgttttaaggacattaaaagctatcaggccaagaccccagcttcattatgcagctgaggtgtgttttttgttgttgttgttgtttattttttttattcctgcttttgaggacacttgggctatgtgtcacagctctgtacaaacaatgtgttgcctcctaccttgcccccaagttctgatttttaatttctatggaagattttttggattgtcggatttcctccctcacatgataccccttatcttttataatgtcttatgcctatacctgaatataacaacctttaaaaaagcaaaataataagaaggaaaaattccaggagggaaaaaaaaaaaa

SEQ ID NO: 973 - DNA, 14796 bp, Homo sapiens
tctagacatgcggatatattcaagctgggcacagcacagcagccccaccccaggcagcttgaaatcagagctggggtccaaagggaccacaccccgagggactgtgtgggggtcggggcacacaggccactgcttccccccgtctttctcagccattcctgaagtcagcctcactctgcttctcagggatttcaaatgtgcagagactctggcacttttgtagaagccccttctggtcctaacttacacctggatgctgtggggctgcagctgctgctcgggctcgggaggatgctgggggcccggtgcccatgagcttttgaagctcctggaactcggttttgagggtgttcaggtccaggtggacacctgggctgtccttgtccatgcatttgatgacattgtgtgcagaagtgaaaaggagttaggccgggcatgctggcttatgcctgtaatcccagcactttgggaggctgaggcgggtggatcacgaggtcaggagttcaataccagcctggccaagatggtgaaaccccgtctctactaaaaatacaaaaaaattagccgggcatggtggcgggcgcatgtaatcccagctactgggggggctgaggcagagaattgctggaacccaggagatggaggttgcagtgagccaagattgtgccactgcactgcactccagcctggcgacagagcaagactctgtctcaaaaaaaaaaaaaaaaagtgaaaaggagttgttcctttcctccctcctgagggcaggcaactgctgcggttgccagtggaggtggtgcgtccttggtctgtgcctgggggccaccccagcagaggccatggtggtgccagggcccggttagcgagccaatcagcaggacccaggggcgacctgccaaagtcaactggatttgataactgcagcgaagttaagtttcctgattttgatgattgtgttgtggttgtgtaagagaatgaagtatttcggggtagtatggtaatgccttcaacttacaaacggttcaggtaaaccacccatatacatacatatacatgcatgtgatatatacacatacagggatgtgtgtgtgttcacatatatgaggggagagagactaggggagagaaagtaggttggggagagggagagagaaaggaaaacaggagacagagagagagcggggagtagagagagggaaggggtaagagagggagaggaggagagaaagggaggaagaagcagagagtgaatgttaaaggaaacaggcaaaacataaacagaaaatctgggtgaagggtatatgagtattctttgtactattcttgcaattatcttttatttaaattgacatcgggccgggcgcagtggctcacatctgtaatcccagcactttgggaggccgaggcaggcagatcacttgaggtcaggagtttgagaccagcctggcaaacatggtgaaaccccatctctactaaaaatacaaaaattagcctggtgtggtggtgcatgcctttaatctcagctactcgggaggctgaggcaggagaatcgcttgaacccgtggcggggaggaggttgcagtgagctgagatcatgccactgcactccagcctgggcgatagagcgagactcagtttcaaataaataaataaacatcaaaataaaaagttactgtattaaagaatgggggcggggtgggaggggtggggagaggttgcaaaaataaataaataaataaataaaccccaaaatgaaaaagacagtggaggcaccaggcctgcgtggggctggagggctaataaggccaggcctcttatctctggccatagaaccagagaagtgagtggatgtgatgcccagctccagaagtgactccagaacaccctgttccaaagcagaggacacactgattttttttttaataggctgcaggacttactgttggtgggacgccctgctttgcgaagggaaaggaggagtttgccctgagcacaggcccccaccctccactgggctttccccagctcccttgtcttcttatcacggtagtggcccagtccctggcccctgactccagaaggtggccctcctggaaacccaggtcgtgcagtcaacgatgtactcgccgggacagcgatgtctgctgcactccatccctcccctgttcatttgtccttcatgcccgtctggagtagatgctttttgcagaggtggcaccctgtaaagctctcctgtctgactttttttttttttttagactgagttttgctcttgttgcctaggctggagtgcaatggcacaatctcagctcactgcaccctctgcctcccgggttcaagcgattctcctgcctcagcctcccgagtagttgggattacaggcatgcaccaccacgcccagctaatttttgtatttttagtagagacaaggtttcaccgtgatggccaggctggtcttgaactccaggactcaagtgatgctcctgcctaggcctctcaaagtgttgggattacaggcgtgagccactgcacccggcctgcacgcgttctttgaaagcagtcgagggggcgctaggtgtgggcagggacgagctggcgcggcgtcgctgggtgcaccgcgaccacgggcagagccacgcggcgggaggactacaactcccggcacaccccgcgccgccccgcctctactcccagaaggccgcggggggtggaccgcctaagagggcgtgcgctcccgacatgccccgcggcgcgccattaaccgccagatttgaatcgcgggacccgttggcagaggtggcggcggcggcatgggtgccccgacgttgccccctgcctggcagccctttctcaaggaccaccgcatctctacattcaagaactggcccttcttggagggctgcgcctgcaccccggagcgggtgagactgcccggcctcctggggtcccccacgcccgccttgccctgtccctagcgaggccactgtgactgggcctcgggggtacaagccgccctcccctccccgtcctgtccccagcgaggccactgtggctgggccccttgggtccaggccggcctcccctccctgctttgtccccatcgaggcctttgtggctgggcctcggggttccgggctgccacgtccactcacgagctgtgctgtcccttgcagatggccgaggctggcttcatccactgccccactgagaacgagccagacttggcccagtgtttcttctgcttcaaggagctggaaggctgggagccagatgacgaccccatgtaagtcttctctggccagcctcgatgggctttgttttgaactgagttgtcaaaagatttgagttgcaaagacacttagtatgggagggttgctttccaccctcattgcttcttaaacagctgttgtgaacggatacctctctatatgctggtgccttggtgatgcttacaacctaattaaatctcatttgaccaaaatgccttggggtggacgtaagatgcctgatgcctttcatgttcaacagaatacatcagcagaccctgttgttgtgaactcccaggaatgtccaagtgctttttttgagattttttaaaaaacagtttaattgaaatataacctacacagcacaaaaattaccctttgaaagtgtgcacttcacactttcggaggctgaggcgggcggatcacctgaggtcaggagttcaagacctgcctggccaacttggcgaaaccccgtctctactaaaaatacaaaaattagccgggcatggtagcgcacgcccgtaatcccagctactcgggaggctaaggcaggagaatcgcttgaacctgggaggcggaggttgcagtgagccgagattgtgccaatgcactccagcctcggcgacagagcgagactccgtcataaaaataaaaaattgaaaaaaaaaaaagaaagaaagcatatacttcagtgttgttctggatttttttcttcaagatgcctagttaatgacaatgaaattctgtactcggatggtatctgtctttccacactgtaatgccatattcttttctcacctttttttctgtcggattcagttgcttccacagctttaatttttttcccctggagaatcaccccagttgtttttctttttggccagaagagagtagctgttttttttcttagtatgtttgctatggtggttatactgcatccccgtaatcactgggaaaagatcagtggtattcttcttgaaaatgaataagtgttatgatattttcagattagagttacaactggctgtctttttggactttgtgtggccatgttttcattgtaatgcagttctggtaacggtgatagtcagttatacagggagactcccctagcagaaaatgagagtgtgagctagggggtcccttggggaacccggggcaataatgcccttctctgcccttaatccttacagtgggccgggcacggtggcttacgcctgtaataccagcactttgggaggccgaggcgggcggatcacgaggtcaggagatcgagaccatcttggctaatacggtgaaaccccgtctccactaaaaatacaaaaaattagccgggcgtggtggtgggcgcctgtagtcccagctactcgggaggctgaggcaggagaatggcgtgaacccaggaggcggagcttgcagtgagccgagattgcaccactgcactccagcctgggcgacagaatgagactccgtctcaaaaaaaaaaaaaaaagaaaaaaatctttacagtggattacataacaattccagtgaaatgaaattacttcaaacagttccttgagaatgttggagggatttgacatgtaattcctttggacatataccatgtaacacttttccaactaattgctaaggaagtccagataaaatagatacattagccacacagatgtggggggagatgtccacagggagagagaaggtgctaagaggtgccatatgggaatgtggcttgggcaaagcactgatgccatcaacttcagacttgacgtcttactcctgaggcagagcagggtgtgcctgtggagggcgtggggaggtggcccgtggggagtggactgccgctttaatcccttcagctgcctttccgctgttgttttgatttttctagagaggaacataaaaagcattcgtccggttgcgctttcctttctgtcaagaagcagtttgaagaattaacccttggtgaatttttgaaactggacagagaaagagccaagaacaaaattgtatgtattgggaataagaactgctcaaaccctgttcaatgtctttagcactaaactacctagtccctcaaagggactctgtgttttcctcaggaagcattttttttttttttctgagatagagtttcactcttgttgcccaggctggagtgcaatggtgcaatcttggctcactgcaacctctgcctctcgggttcaagtgattctcctgcctcagcctcccaagtaactgggattacagggaagtgccaccacacccagctaatttttgtatttttagtagagatggggtttcaccacattgcccaggctggtcttgaactcctgacctcgtgattcgcccaccttggcctcccaaagtgctgggattacaggcgtgaaccaccacgcctggcttttttttttttgttctgagacacagtttcactctgttacccaggctggagtagggtggcctgatctcggatcactgcaacctccgcctcctgggctcaagtgatttgcctgcttcagcctcccaagtagccgagattacaggcatgtgccaccacacccaggtaatttttgtatttttggtagagacgaggtttcaccatgttggccaggctggttttgaactcctgacctcaggtgatccacccgcctcagcctcccaaagtgctgagattataggtgtgagccaccacacctggcctcaggaagtatttttatttttaaatttatttatttatttgagatggagtcttgctctgtcgcccaggctagagtgcagcgacgggatctcggctcactgcaagctccgccccccaggttcaagccattctcctgcctcagcctcccgagtagctgggactacaggcgcccgccaccacacccggctaatttttttgtatttttagtagagacgggttttcaccgtgttagccaggagggtcttgatctcctgacctcgtgatctgcctgcctcggcctcccaaagtgctgggattacaggtgtgagccaccacacccggctatttttatttttttgagacagggactcactctgtcacctgggctgcagtgcagtggtacaccatagctcactgcagcctcgaactcctgagctcaagtgatcctcccacctcatcctcacaagtaattgggactacaggtgcaccccaccatgcccacctaatttatttatttatttatttatttattttcatagagatgagggttccctgtgttgtccaggctggtcttgaactcctgagctcacgggatccttttgcctgggcctcccaaagtgctgagattacaggcatgagccaccgtgcccagctaggaatcatttttaaagcccctaggatgtctgtgtgattttaaagctcctggagtgtggccggtataagtatataccggtataagtaaatcccacattttgtgtcagtatttactagaaacttagtcatttatctgaagttgaaatgtaactgggctttatttatttatttatttatttatttatttttaatttttttttttgagacgagtctcactttgtcacccaggctggagtgcagtggcacgatctcggctcactgcaacctctgcctcccggggtcaagcgattctcctgccttagcctcccgagtagctgggactacaggcacgcaccaccatgcctggctaatttttgtatttttagtagacggggtttcaccatgctggccaagctggtctcaaactcctgaccttgtgatctgcccgctttagcctcccagagtgctgggattacaggcatgagccaccatgcgtggtctttttaaaattttttgattttttttttttttgagacagagccttgctctgtcgcccaggctggagtgcagtggcacgatctcagctcactacaagctccgcctcccgggttcacgccattcttctgcctcagcctcctgagtagctgggactacaggtgcccaccaccacgcctggctaattttttttggtatttttattagagacaaggtttcatcatgttggccaggctggtctcaaactcctgacctcaagtgatctgcctgcctcggcctcccaaagcgctgagattacaggtgtgatctactgcgccaggcctgggcgtcatatattcttatttgctaagtctggcagccccacacagaataagtactgggggattccatatccttgtagcaaagccctgggtggagagtcaggagatgttgtagttctgtctctgccacttgcagactttgagtttaagccagtcgtgctcatgctttccttgctaaatagaggttagaccccctatcccatggtttctcaggttgcttttcagcttgaaaattgtattcctttgtagagatcagcgtaaaataattctgtccttatatgtggctttattttaatttgagacagagtgtcactcagtcgcccaggctggagtgtggtggtgcgatcttggctcactgcgacctccacctcccaggttcaagcgattctcgtgcctcaggctcccaagtagctgagattataggtgtgtgccaccaggcccagctaacttttgtatttttagtagagacagggttttgccatgttggctaagctggtctcgaactcctggcctcaagtgatctgcccgccttggcatcccaaagtgctgggattacaggtgtgaaccaccacacctggcctcaatatagtggcttttaagtgctaaggactgagattgtgttttgtcaggaagaggccagttgtgggtgaagcatgctgtgagagagcttgtcacctggttgaggttgtgggagctgcagcgtgggaactggaaagtgggctggggatcatctttttccaggtcaggggtcagccagcttttctgcagcgtgccatagaccatctcttagccctcgtgggtcagagtctctgttgcatattgtcttttgttgtttttcacaaccttttagaaacataaaaagcattcttagcccgtgggctggacaaaaaaaggccatgacgggctgtatggatttggcccagcaggcccttgcttgccaagccctgttttagacaaggagcagcttgtgtgcctggaaccatcatgggcacaggggaggagcagagtggatgtggaggtgtgagctggaaaccaggtcccagagcgctgagaaagacagagggtttttgcccttgcaagtagagcaactgaaatctgacaccatccagttccagaaagccctgaagtgctggtggacgctgcggggtgctccgctctagggttacagggatgaagatgcagtctggtagggggagtccactcacctgttggaagatgtgattaagaaaagtagactttcagggccgggcatggtggctcacgcctgtaatcccagcactttgggaggccgaggcgggtggatcacgaggtcaggagatcgagaccatcctggctaacatggtgaaaccccgtctttactaaaaatacaaaaaattagctgggcgtggtggcgggcgcctgtagtcccagctactcgggaggctgaggcaggagaatggcgtgaacctgggaggtggagcttgctgtgagccgagatcgcgccactgcactccagcctgggcgacagagcgagactccgtctcaaaaaaaaaaaaaaaagtaggctttcatgatgtgtgagctgaaggcgcagtaggcagaagtagaggcctcagtccctgcaggagacccctcggtctctatctcctgatagtcagacccagccacactggaaagaggggagacattacagcctgcgagaaaagtagggagatttaaaaactgcttggcttttattttgaactgttttttttgtttgtttgttttccccaattcagaatacagaatacttttatggatttgtttttattactttaattttgaaacaatataatcttttttttgttgtttttttgagacagggtcttactctgtcacccaggctgagtgcagtggtgtgatcttggctcacctcagcctcgaccccctgggctcaaatgattctcccacctcagcttcccaagtagctgggaccacaggtgcgtgtgttgcgctatacaaatcctgaagacaaggatgctgttgctggtgatgctggggattcccaagatcccagatttgatggcaggatgcccctgtctgctgccttgccagggtgccaggagggcgctgctgtggaagctgaggcccggccatccagggcgatgcattgggcgctgattcttgttcctgctgctgcctcggtgcttagcttttgaaacaatgaaataaattagaaccagtgtgaaaatcgatcagggaataaatttaatgtggaaataaactgaacaacttagttcttcataagagtttacttggtaaatacttgtgatgaggacaaaacgaagcactagaaggagaggcgagttgtagacctgggtggcaggagtgttttgtttgttttctttggcagggtcttgctctgttgctcaggctggagtacagtggcacaatcacagctcactatagcctcgacctcctggactcaagcaatcctcctgcctcagcctcccagtagctgggactacaggcgcatgccaccatgcctggctaattttaaatttttttttttctcttttttgagatggaatctcactctgtcgcccaggctggagtgcagtggcgtgatctcggctgacggcaagctccgcctcccaggttcactccattcgcctgcctcagcctcccaagtagctgggactacaggcgctgggattacaaacccaaacccaaagtgctgggattacaggcgtgagccactgcacccggcctgttttgtctttcaatagcaagagttgtgtttgcttcgcccctacctttagtggaaaaatgtataaaatggagatattgacctccacattggggtggttaaattatagcatgtatgcaaaggagcttcgctaatttaaggcttttttgaaagagaagaaactgaataatccatgtgtgtatatatattttaaaagccatggtcatctttccatatcagtaaagctgaggctccctgggactgcagagttgtccatcacagtccattataagtgcgctgctgggccaggtgcagtggcttgtgcctgaatcccagcactttgggaggccaaggcaggaggattcattgagcccaggagttttgaggcgagcctgggcaatgtggccagacctcatctcttcaaaaaatacacaaaaaattagccaggcatggtggcacgtgcctgtagtctcagctactcaggaggctgaggtgggaggatcactttgagccttgcaggtcaaagctgcagtaagccatgatcttgccactgcattccagcctggatgacagagcgagaccctgtctctaaaaaaaaaaaaaaccaaacggtgcactgttttcttttttcttatcaatttattatttttaaattaaattttcttttaataatttataaattataaatttatattaaaaaatgacaaatttttattacttatacatgaggtaaaacttaggatatataaagtacatattgaaaagtaattttttggctggcacagtggctcacacctgtaatcccagcactttgggaggccgtggcgggcagatcacatgagatcatgagttcgagaccaacctgaccaacatggagagaccccatctctactaaaaatacaaaattagccggggtggtggcgcatgcctgtaatcccagctactcgggaggctgaggcaggagaatctcttgaacccgggaggcagaggttgcggtgagccaagatcgtgcctttgcacaccagcctaggcaacaagagcgaaagtccgtctcaaaaaaaaagtaattttttttaagttaacctctgtcagcaaacaaatttaacccaataaaggtctttgttttttaatgtagtagaggagttagggtttataaaaaatatggtagggaagggggtccctggatttgctaatgtgattgtcatttgccccttaggagagagctctgttagcagaatgaaaaaattggaagccagattcagggagggactggaagcaaaagaatttctgttcgaggaagagcctgatgtttgccagggtctgtttaactggacatgaagaggaaggctctggactttcctccaggagtttcaggagaaaggtagggcagtggttaagagcagagctctgcctagactagctggggtgcctagactagctggggtgcccagactagctggggtgcctagactagctgggtactttgagtggctccttcagcctggacctcggtttcctcacctgtatagtagagatatgggagcacccagcgcaggatcactgtgaacataaatcagttaatggaggaagcaggtagagtggtgctgggtgcataccaagcactccgtcagtgtttcctgttattcgatgattaggaggcagcttaaactagagggagttgagctgaatcaggatgtttgtcccaggtagctgggaatctgcctagcccagtgcccagtttatttaggtgctctctcagtgttccctgattgttttttcctttgtcatcttatctacaggatgtgactgggaagctctggtttcagtgtcatgtgtctattctttatttccaggcaaaggaaaccaacaataagaagaaagaatttgaggaaactgcgaagaaagtgcgccgtgccatcgagcagctggctgccatggattgaggcctctggccggagctgcctggtcccagagtggctgcaccacttccagggtttattccctggtgccaccagccttcctgtgggccccttagcaatgtcttaggaaaggagatcaacattttcaaattagatgtttcaactgtgctcctgttttgtcttgaaagtggcaccagaggtgcttctgcctgtgcagcgggtgctgctggtaacagtggctgcttctctctctctctctcttttttgggggctcatttttgctgttttgattcccgggcttaccaggtgagaagtgagggaggaagaaggcagtgtcccttttgctagagctgacagctttgttcgcgtgggcagagccttccacagtgaatgtgtctggacctcatgttgttgaggctgtcacagtcctgagtgtggacttggcaggtgcctgttgaatctgagctgcaggttccttatctgtcacacctgtgcctcctcagaggacagtttttttgttgttgtgtttttttgttttttttttttggtagatgcatgacttgtgtgtgatgagagaatggagacagagtccctggctcctctactgtttaacaacatggctttcttattttgtttgaattgttaattcacagaatagcacaaactacaattaaaactaagcacaaagccattctaagtcattggggaaacggggtgaacttcaggtggatgaggagacagaatagagtgataggaagcgtctggcagatactccttttgccactgctgtgtgattagacaggcccagtgagccgcggggcacatgctggccgctcctccctcagaaaaaggcagtggcctaaatcctttttaaatgacttggctcgatgctgtgggggactggctgggctgctgcaggccgtgtgtctgtcagcccaaccttcacatctgtcacgttctccacacgggggagagacgcagtccgcccaggtccccgctttctttggaggcagcagctcccgcagggctgaagtctggcgtaagatgatggatttgattcgccctcctccctgtcatagagctgcagggtggattgttacagcttcgctggaaacctctggaggtcatctcggctgttcctgagaaataaaaagcctgtcatttcaaacactgctgtggaccctactgggtttttaaaatattgtcagtttttcatcgtcgtccctagcctgccaacagccatctgcccagacagccgcagtgaggatgagcgtcctggcagagacgcagttgtctctgggcgcttgccagagccacgaaccccagacctgtttgtatcatccgggctccttccgggcagaaacaactgaaaatgcacttcagacccacttatttatgccacatctgagtcggcctgagatagacttttccctctaaactgggagaatatcacagtggtttttgttagcagaaaatgcactccagcctctgtactcatctaagctgcttatttttgatatttgtgtcagtctgtaaatggatacttcactttaataactgttgcttagtaattggctttgtagagaagctggaaaaaaatggttttgtcttcaactcctttgcatgccaggcggtgatgtggatctcggcttctgtgagcctgtgctgtgggcagggctgagctggagccgcccctctcagcccgcctgccacggcctttccttaaaggccatccttaaaaccagaccctcatggctgccagcacctgaaagcttcctcgacatctgttaataaagccgtaggcccttgtctaagcgcaaccgcctagactttctttcagatacatgtccacatgtccatttttcaggttctctaagttggagtggagtctgggaagggttgtgaatgaggcttctgggctatgggtgaggttccaatggcaggttagagcccctcgggccaactgccatcctggaaagtagagacagcagtgcccgctgcccagaagagaccagcaagccaaactggagcccccattgcaggctgtcgccatgtggaaagagtaactcacaattgccaataaagtctcatgtggttttatctactttttttttctttttctttttttttgagacaaggccttgccctcccaggctggagtgcagtggaatgaccacagctcaccgcaacctcaaattcttgcgttcaagtgaacctcccactttagcctcccaagtagctgggactacaggcgcacgccatcacacccggctaattgaaaaatttttttttttgtttagatggaatctcactttgttgcccaggctggtctcaaactcctgggctcaagtgatcatcctgcttcagcgtccgacttgttggtattataggcgtgagccactgggcctgacctagctaccattttttaatgcagaaatgaagacttgtagaaatgaaataacttgtccaggatagtcgaataagtaacttttagagctgggatttgaacccaggcaatctggctccagagctgggccctcactgctgaaggacactgtcagcttgggagggtggctatggtcggctgtctgattctagggagtgagggctgtctttaaagcaccccattccattttcagacagctttgtcagaaaggctgtcatatggagctgacacctgcctccccaaggcttccatagatcctctctgtacattgtaaccttttattttgaaatgaaaattcacaggaagttgtaaggctagtacaggggatcc

SEQ ID NO: 974 - DNA, 432 bp, Homo sapiens
  misc_feature: n=a,t,g or c
ggcccatatccagtatggcggttatagatgtaaaaatgctatcaggatttactccaaccatgtcatccattgaagagcttgaaaacaagggccaagtgatgaagactgaagtcaagaatgaccatgttcttttctacttggaaaatgttttgggtcgagcagacagtttcactttttctgctgagcagagcaaccttgtgttcaacattcagccagccccaggcatggtctacgattagtacgaaaaagaagaatatgccctagctttttaccacatcaacagnagcncaagtttccgagtgagacaaaagcaattactggnagaagtaaagaaattttattacgtcataaaccattgaaaacacatctngtaagaaaatgaaancctgantaagataggacaaatagntggngaaagaaaagtctcttggt

SEQ ID NO: 975 - DNA, 559 bp, Homo sapiens
  misc_feature: n=a,t,g or c
ggnnggggnnngccatggaaagctggatatgaaatgtctaccttcttgacttacgggtcatgttgtggtccttcctatttccaccttaaaattgacaaggcctcgctcaaatttgtgctaccaatgatacagagtttatagcaaattttctaagggaagtatctgtggaaattttctcatgattcatgaaaaatgttattagaagtacaagtatcctggaatcagtcatcaggtcctccctctaagcccactgggaacaaactgaggtgtgtttatgaaagattccttactgttagttgtaagcaggctgtagaaagcccatcatccttagaagaagattcttctactaagcaatgttacatgatccaacctttaagacctctatctgtgagaggatcaaggatgcaccagtaaatgtgaactaatcataggtttctcataccagtcttctccaacttggncaggattgagggnaggnattcagatgnaggttcaaaccatgagtngattcagttgggnttaccaggtgatnanaaaaannnnnnnnnnnnnnnnnnnt

SEQ ID NO: 976 - DNA, 3273 bp, Homo sapiens; identical to SEQ ID NO: 568

SEQ ID NO: 977 - DNA, 437 bp, Homo sapiens
ttttaaatatttaagagtttatttgagcagtgatccatgaattgggcagctccaagccagaagtggctagggagctccccagagagaacatgaggaggaggctttttaggacaaatagataaaagcaaagataatatttcattggttacagttatacagttacacagttatacagttgccttatttggtctatcccatgaggaagtcctagttactaattacgtttttgttggctgcttctgattggttgagcttaagttctgtgtttctttaacataggcatttacaagaaataccacaaataaagtttcagacatgcttgcaaatcaagcaaggttaaggtcacttagggggcccaactggctctgtctgctcaaggattcttctggcctcgtctccattttacatgaactggttgcataaataaacacagagta

SEQ ID NO: 978 - DNA, 456 bp, Homo sapiens
  misc_feature: n=a,t,g or c
tttttttttttttttttaatagaacaggtcaagataaggctttatttctatagaaatgatgctttgacaatagtttggcttggtgtaaggctcacaaaagaaaatcacatgtaccatgtgtgggttaagcggtttgattcacactgaaccaggccagcccagttgccctctgctgtgtccacccgtggagtggagctgtgtcacagccatcacactggtaaactgctgtagctggtttaccaggctttctcttgccctgacagtacaggtgaagcctgtaaataaatcttctgctatctttgtgaacttaaccaaatcccagttaccttatttaaatggcaatagatctgttttcccttaaactagaaaccttaattacctgtattcctacctccagctcaacccatatatttgcanctttccagtaagcaggttttgtattttccatcgccccct

SEQ ID NO: 979 - DNA, 447 bp, Homo sapiens
ttcatgtttccagaaatctcttttatttctttagatatataaaacactgttactttatattctctctgataattctagtatctgggtctagagtcaatctgttgcttctgctgggtctcatagtgtattgtttccttgtggtgtttatgaatttttaaacctggatctctcattttctttctttcttttttttttcttgtagagatggggtctctcactgcgttgcccaggctgctctggaactcctggcctcaagtgctgggattccaggcgtgaaccaccacgcccggctgagatgttccttttccttggaacttgattcaacacaaaatcctgaggcctggtgtgggtgtgttcctctggggcagattctcaactggggacacttctgcccccaaggacacattttcaacatcctgagacatttccgggtgtcatcacagtgtg

SEQ ID NO: 980 - DNA, 261 bp, Homo sapiens; identical to SEQ ID NO: 5

SEQ ID NO: 981 - DNA, 545 bp, Homo sapiens
  misc_feature: n=a,t,g or c
gaccatgatattctttttattgaaaagtaatataaaatggctttagacataaaagatagtattttacattatttcttctgttatatttttacgctttgtgccagaatttacttcttgcaactattcttgctttatctggaacagtttactccgttattgaatatctattagtgtttaatatagaagagcttaataaaccgctaatccgaaaataatggtattcccttgcttttcagacctttttgctgaatatgcttatttatgtccaatgtggaaatctgatcctgctctcttccactctgccagcagttccttttgtactgcttctggtagttcatagaaaacttgaggatcaatgtcagaagggaaagtaattttctcatcaacagaatctggctctctattttctgtaagtcctcatgagagtcgttgctactgtttgcttatgggcatcgtagtgtggtttctggagaaaagttgctcactctgcaagtttggaaatgaatgaaaagcagacncagcagggnttgaatttggtaaagtgg

SEQ ID NO: 982 - DNA, 376 bp, Homo sapiens
tttttacatttactgatggaaaggtgaaatggtagatcgaagccagacattaaaactgttttaaattctcacttacttggacatagaatatcagcagtctcaaagtcattcacccggcagataggcaaaaatgagtcccttgaagatgaagtacaaaaagactattgaaaagtattttgcacattaaatgctaagctataggatataaacatcttattttcagaaagagatttctggatatatttcttaaggtcagtggacgaagccagaattctactataatgtataaccctatagcactgaaatctattttttcctgtatattaatcatgtagtcatgcaatactaaagtatagttacagattctaataaatag

SEQ ID NO: 983 - DNA, 287 bp, Homo sapiens; identical to SEQ ID NO: 573

SEQ ID NO: 984 - DNA, 388 bp, Homo sapiens; identical to SEQ ID NO: 14

SEQ ID NO: 985 - DNA, 268 bp, Homo sapiens
gccccaaaatattttttattcttgcattacatttgtgtttccaattgtgaataaaaaatgcttagaaagtggttacaaaacagcgtgaactggacaggaggagcagctggccctgagggtccgtcacttctccacttagacggcgtgaagtgggcctggcgtctaggcggggtcagtcaggcttctcactctcaggatctggtgtgggcacggacagggtcggggcggctccgggaatgaccgtggtggacagagggccgggcgctgg

SEQ ID NO: 986 - DNA, 330 bp, Homo sapiens; identical to SEQ ID NO: 20

SEQ ID NO: 987 - DNA, 374 bp, Homo sapiens
tttttaatatttaaaatgtttaatagttaaaattttttaacaatttaactttaaaaaggtcacacattttctgatccagcaatgccccaatcagattgtttcattttattattattatcaacactgtcccctttttggcacctgtaaaatagttcctttcgggagtttggagccaggccaggcaccgtcggctatggggatgagatgggcaggtttggagctcctctgtctagtgaggatcacggtctgcagagaagggttggcctccccgtctcctatcaaggcttaaagcaaggagaaccatcccaaatttggttccttttcccctaagtatccttagaggcaatccaccctgtgactaggtgactaggtga

SEQ ID NO: 988 - DNA, 284 bp, Homo sapiens; identical to SEQ ID NO: 578

SEQ ID NO: 989 - DNA, 387 bp, Homo sapiens
tttttttttttttgtcaattattttattgagcagaaagttaatggttacacgtaccataacagtagattcttagaggattccaatttcctgtttagtatttaagtgacatcataaaattctcaatatatgatatttactgataatgacatttgaattgtcacttctccaccaataagtcttccaaaaagcacaagactattattattattccaattgtctgttttagtagtacactttatcttacttcttagcttctttgaactattttttctttacaattcatccacttaatattcttgcgatagaaataattttcaaaataaaagtgagacaaaaaggataaaaagtcatacactctaattcaaatttcaacatttataaaaatc

SEQ ID NO: 990 - DNA, 303 bp, Homo sapiens; identical to SEQ ID NO: 34

SEQ ID NO: 991 - DNA, 523 bp, Homo sapiens
ttttttttttttttttttttttttttttttttttttttttacagggtaaaggctctgttgacttcagcacgaccaccccagccccaggcaggcagaacagctaggtgaagaggcggacagtcccgtctgcccccgaggagaagacccacggctgggtggggtggaagatgacgtccagcactcccagatctcgggtcagcacgtgtcccttcagcaccttgacgggcaccagcaaggggttctgcagaaggtcattgtacaccatgccatggcagacgatgacactgccgtcgtccgagcctgacgcaaagagtgggtaccgcgggtggaaggccacagcccgcagagccttcttgtggtgtctcagcatcctgtatggcttggtggaaagatccaggtcaaaccacaccagcttgctatcgtagctcccacagatgacgttgtcacctgcagggtgcaccgccaggctggacacccatttgcagttgggcatcagcttcttggtgagctcctggcgcacaag

SEQ ID NO: 992 - DNA, 379 bp, Homo sapiens; identical to SEQ ID NO: 37

SEQ ID NO: 993 - DNA, 477 bp, Homo sapiens
tttttttgatttgcaaaaacacagacattttaactttaataagttatacaagtaaggagtcaaattttacattacagaacaaagatgtattggttgttgtatcggtaagccagaattttgtgatttgagtccagcaccttgattcagtatagtggctacctgtcatacaggagggagtggaatcacaaactgcttcatctgctaagatgttgctattgagcaccatgtatatactcaaaacaaacagaaaaaccttaaaatacaaatgaaagccttatacatgaaattccatgggttttccaaaaggagtaaatcagagagctgggttccacaaatctaacacgagtctgcccactaaggagaagtgactcagggacactgttgcagattttctagtgcagcggaaggtctgagtctcatcatgcggttagaaactcagctagaagacatctgtctgcctcctctgggcgccaggag

SEQ ID NO: 994 - DNA, 327 bp, Homo sapiens; identical to SEQ ID NO: 582
  misc_feature: n=a,t,g or c

SEQ ID NO: 995 - DNA, 327 bp, Homo sapiens
tttttttttgttttaaacactttatttataaaaaagtacatttttaatcctcagtacattttcaacccatcatttttttttaatacaagtaaaagggggtgatgcaaacaccccccaggtcagaaccaggaggatctgctgggctgtccctggaccaaaggcggaaagggcgacaagacgccgaagcaaggtagcgcatcacgctgggaggggagggtggcagcttctcctgggattcttttcatttatacaaaaaaggaaaaccaattttttcgaccaagaatcccattcctcacagcaggggtcagaagagcagcagcaccgagt

SEQ ID NO: 996 - DNA, 443 bp, Homo sapiens
  misc_feature: n=a,t,g or c
cagatatantatcaacactgaggtttaccagtacaaatacaatatcttgcctcaaaaggccttaaacagtacggaaatgtgttatctaaattaattaaaggttataaagtcaagttggctccagacatggnacaatgaggacatctggacagatataaaagagaactctgaacccctcatatcctcctaaacctttctaagaggcagtcctctcaaatccccaaccaagctgctctgcattaaacatttcaatgacttaacctgggggcaatggcctcacacaggtatgcagcttcttctcaggcaggccaccccctttcactgctctggaaccctccgggcccaggagttctcaggcataggcccctaggataggcaggtacaagggtctggattttaaggngataaccaaggcattttggttaattttcctagggggggtt

SEQ ID NO: 997 - DNA, 446 bp, Homo sapiens
  misc_feature: n=a,t,g or c
attctgccggtggagacagataaaaagcctcaggggaagcagctacagacccgagcggattacttgttgaagctgctcagaaagggtctggagaagaagggggctgtgacaggtggggaagaggccaaattaaagaagcggaancttcgggtaaagaaggaaaacaaagtgcccaggctgaaagaggagcatggaattgagctttcatctcctaggcattcagataatccatcagaagagggagaagtgaaagatgatggcttggaaaaaagtccaatganaaaaaaacagaagaaganagagaacaagggaaggaggggagggaagggagggnaagggagggaggggnaggaagggaggggnagggaagggaggggaagggaagggaggggaaggcttcttnccccntttctttnggcctccgaggggccnattttcccnctttt

SEQ ID NO: 998 - DNA, 375 bp, Homo sapiens
  misc_feature: n=a,t,g or c
aaaagataatcttgcctccaccgtattacctttacttctttgtcaagattcataggccatatttttatgtggatctgcttctgggctgtctgctctgtcaactgatccatctgtctgtncttttgccaacctatcttgatgcctgtagctttatggnaagtctttaaggcaggcagcgtcatttctcctcctttgctcttgcccttcagtactgtgttggctactccagggnagtctccctttccatataaactttagaatcagtttttccgtatccaaaaaacaactcactggggatttttatgagggagtgcattggaatccatttatggaatttggggaaggaaccggcatcttggactatattaagggctt

SEQ ID NO: 999 - DNA, 481 bp, Homo sapiens; identical to SEQ ID NO: 62
  misc_feature: n=a,t,g or c

SEQ ID NO: 1000 - DNA, 404 bp, Homo sapiens
ttgcataacgaaagagtaacctagcatgtattatattttacagtgaaccatctaaaattaccttaatattcgtggcaggaacaggcccagacgaaggcaagccagagccttctttgacttgtgagccagaattgtgcaaataaggattagaaaagtattggtagaaacccagttttaagtttgtatgaagttagcaacattgtttcaaaataaatcaaacaaggccaagagcagtggcacatgcctgtaatcccagcactttgggaggccggggcgggtgtatcgcttgaggtcaggagtttgggatcagcctgggccaacatggtgaaaccccatctccaactaaaaaatgcgaggattggctgggcatggtggcatgcgcctgtggttccagctactcggga

SEQ ID NO: 1001 - DNA, 241 bp, Homo sapiens
  misc_feature: n=a,t,g or c
aatgtttaatctttccaattaaatacttccattccataaacttcagaaccaaagttagataccaacaagagactgaagataaatacagtgtcaatagtatcaagggactagcccatataatatacttgaaaatcgtattaatcaccaataaagtaccccaccataaacaaaatacacantaaaangtcaaggatacaattaaagacaggccaacatatgaggtggaccattgacaggagng

SEQ ID NO: 1002 - DNA, 270 bp, Homo sapiens
  misc_feature: n=a,t,g or c
tttttttttgtattgtatacacagtggaaagctggttttatttgggagacaatgggagcttttacattgttgagcaaaggagtgacgagatcagtcttgctttttagaaagattagtttggcagttacttatttgtaaccaganttagacagcaaatcgggatgcagggggagaagtcaggtgactattagtctgcgagtaattctgggacaagagcagtggtaatggaattnaaagggattaaagtntttaccaggttttggcataaat

SEQ ID NO: 1003 - DNA, 253 bp, Homo sapiens
  misc_feature: n=a,t,g or c
cgngcaaaagtgtttatttttctccttcagatatacantctattggggnttccgtgccactgaccaccatgtacaaggaagggnttcacaggcaagggggacaggtgagggcagcccccacttcactcaaggaacagggcaagggggcccagtacagagaacagaaatctcttacgacagcatcgtgccctggcagangattctgcatantcacctagaaatttcaattctaactgntttgatggaataatag

SEQ ID NO: 1004 - DNA, 299 bp, Homo sapiens; identical to SEQ ID NO: 71
  misc_feature: n=a,t,g or c

SEQ ID NO: 1005 - DNA, 342 bp, Homo sapiens
ttaaaaaaattttttttattgaagaacagcatacataaagacacaccagttttaagtgcacaacccatttctcacaaagtagacacacttgagtttccaccaccaggtgaagagataaagccttattagcacctcaaaagatcctccccttgtgccccttttcccattacccaccctcctccccaaaggtaaccactatcctgacaccataggttagtttttgcctgtttttaaacttcacaaaaatggaatcatacagtctgcattctttaatgtctggctcctttcgctcaacatcatgtttgtgagattcatccaggttgcctgtagcagcagttcatt

SEQ ID NO: 1006 - DNA, 505 bp, Homo sapiens
  misc_feature: n=a,t,g or c
gtctcaaaaacaggtattatctttattaaaaaatggatagatatagcagcacttacaaaacaggttcatcaaaggcattgtacactgtcaactgataatgtggagagggcagccccctgcccagctggctatgggctctgcacaacgcttgcccgcaaccacctgctccacttggtacaacggagcccagaacacctgcgaggagagccacgccaccgtcgcnctccacagcttcaagcttttgttgttgtggggagtcccttagggtcaagtagcaccttccatagcagcatcgggagcacgcactgggtgtctgggaggtggctgggtgtactttgacccactttattttaaaaaaaacctattaggcatttcaattaaaaaacactttttgccctgttttggatggccattccacaggaaatactttctgtttgtngggaaggaaacactttttccctttcaggatatcttgttaaaaggcaaacggacggcttccgttcgt

SEQ ID NO: 1007 - DNA, 510 bp, Homo sapiens; identical to SEQ ID NO: 595
  misc_feature: n=a,t,g or c

SEQ ID NO: 1008 - DNA, 575 bp, Homo sapiens
  misc_feature: n=a,t,g or c
aaataataataggctttctgccccaactaaaggaattttaggcttctgcaacaagtggaggaggcattttgaagatgggacacaaagaagtcttctttctccagatccagaagtcaggccttgtaagaattcaagccaaaaaaagttcatccatngggaaaaacggttcttctatcatccagcacgtatttgtgccaacagagctgagggacttgagtaattcaagaggctaggggttggggggcagatgtgtccagtggctcccacagccccgccgtcctgaaagtcacgccagttaatgtgcctcggggtnggatcagccctcccgacagatgactactaaggaaattaatccccagttaataatgtggctttggaccaagtaagtcaagattatttttcctacaattatacaaagatatgcttttccagaagggaacttctggaaaaagaaccaataacactatgcttaaaatattattcacatatttaggagaagaaagaacttnaaatagcagaagacctggaataccatgatncacggtggccaccctggggagcatgtctttgtgtga

SEQ ID NO: 1009 - DNA, 287 bp, Homo sapiens
tttcacaaatgtcaattttattgacactagtgcacaactaaatacaataattgcaaaggaagtggaacgtgtcaaacagaaatggtgacaatgagttagaactgcagttgtttcaaggtactacactattatttaaaaaaaaaactcacaaaaagaaaaatgttatcactacaagtaggaattagaagagagaaatcctggcagtctgtctagaggttaaaacatttcatgcatttgtgagttgctgttggagagtttgttttttatttgtccaccgtaatctggca

SEQ ID NO: 1010 - DNA, 416 bp, Homo sapiens
gtttctgagaatcagcactgctagtggagatgggcgccactactgctaccctcactttacctgcgccgtggacactgagaacatccgccgtgtcttcaacgactgccgtgacatcatccagcgcatgcatctccgccaatacgagctgctctaagaagggaacacccaaatttaattcagccttaagcacaattaattaagagtgaaacgtaattgtacaagcagttggtcacccaccatagggcatgatcaacaccgcaacctttcctttttcccccagtgattctgaaaaacccctcttcccttcagcttgcttagatgttccaaatttagtaagcttaaggcggcctacagaagaaaaagaaaaaaaaggccacaaaagttccctcctcactttcagtaaataaaataaaagc

SEQ ID NO: 1011 - DNA, 561 bp, Homo sapiens
  misc_feature: n=a,t,g or c
tattttttatcatttttatttttcaaccataccaatgtattacctattcacaattttaaccacacaaaatcaattttaaggaaaaccccgtaacagtgttaggagtgcttcttttcagtacctgatatgatactttcgcccggctaaatgactggcccagtaccctgacttccagaacctgtagccgtccatttctcttcggctgtcacagaaaggagtgtaaccataaggagcaccatccaaattgaaatctcttaactctttcagatctgttcgtacaatctgatcagcatccacaaacaggaacttgtcaacaactagtgggaaaagtacatccaggaagaggatcttgtaaccccagatgatacgctgtttttcagtttgttgangaagccaccggggccatttgtactggaacaagctcatactgggaaattgtanttcatttgccatgtaaggtataaactccttaaatgtgggggacaagtaattcttcaagaaccagaatttcacaggagtcctggnattcttcagcacggatagcatcatnatgcgagaang

SEQ ID NO: 1012 - DNA, 279 bp, Homo sapiens
  misc_feature: n=a,t,g or c
gaggtcataaagaactttaataattcagagaagaagttcaaagtgtatttaaaagttgagaccctgctttacaatattttataattttaaaaaaaggcgtttaaaggtgataggtgacttaataattttccactttcaaaatgggtttctagacactgttgttcatgaaccaaaaacaaacaaacaaacaaacaacaacaaaacccaaacactttggcaagcaaagtattattagtacatagcagcttcataacagtttacttttttaatataaagngg

SEQ ID NO: 1013 - DNA, 423 bp, Homo sapiens
  misc_feature: n=a,t,g or c
ttttttttttttttttttcaagaatggaatatttgatttattctaaaatttgtgaatatttaaaaattttcaatataaaaagccagagncttgggcagggacaggcccaaagatgtctctgcctgagaactaagtgatggggcaaacccacttaatagtggccagagagcaaaggagagttataagaaaccgtaaaccaggctagggcagattcaccttcctaggggcaagacaaagaaggaagggggtagacagagcctactaagtaagctgcttatcccttctgccacatggttcagattcaatctaagaatgtgtatggtgacacctagtcagagacaggccctggcaggggacataaaaaacaaataaggcttcacccttcctctcaaagagcttacatgcaaagacgaaggaccancc

SEQ ID NO: 1014 - DNA, 459 bp, Homo sapiens
  misc_feature: n=a,t,g or c
tttagtgtaaattggcaaattttatttaaacctaatgaatccatgtaagactggactgtactgtctcgattatggagtctcattataacagcatccttaggggttacattgtggcactacctaaaaggtaaaagtgctgcaataagggctctgcaggcaattccatcacaaaaccccatggaataggatcacctcccaccaatcttttgctaagcactactctctggtaaagagtacagaagtttcaatgttttgatttttttttttccaggttggcatgatacaaatggcagcacacaaaaacaatgttaaaaaataaaccaaataaaaggctgtacacnagaactttatgtttattgcaaacaaacnaaccaaaaaaaaagggaaagagagggaaaggggaaaatggtcngaagcnccacnttttagggtaagaattttaaagcntccttacantct

SEQ ID NO: 1015 - DNA, 258 bp, Homo sapiens; identical to SEQ ID NO: 611
  misc_feature: n=a,t,g or c

SEQ ID NO: 1016 - DNA, 339 bp, Homo sapiens
  misc_feature: n=a,t,g or c
tttcgttttattatttttttaatttttaaaggtgttcttttccccccttttccccctcccggccactccggtttgtgtttgccacaagactcataattcctttagaaagtggagtcgaattcataaaagtgatggggggagagcgcggagagggaaggctgggagcccagggagtcttcactacctacactgccgctcagctccaggcgcgagtggaggtcggtgtggggagacgcgactcctgcccgggatggctgacactctgcgagccccggcggccacgcgnggccggntcgaactagttggagggcgcggagggtcccggngggcgggtggcct

SEQ ID NO: 1017 - DNA, 407 bp, Homo sapiens
ggaaaataactttattcatgactgtgtttatcacactatcttatggagaagagatgatcaataaatatttgctgaataaatgaatagcagttacaaaacacttgattcatatggaattaatgttggttctcaaagtgaaaaattacaaacagcactgatattcagccagtatacaagtctggtcacagcagttgtataatactgaaataccccctgccactgacctttggcccccagatgcctcccactgccactgctctccccactgggaacccctgaagttcccacaggctcataactaaagggctaatgtcttgcacagcagcgagcacccaggaccgagcagccacatggccgggtctgctggtgaaagcatccattctgactgatcaggacctgaggggcct

SEQ ID NO: 1018 - DNA, 151 bp, Homo sapiens
ccaataaagctttatttacaaacacaggctgtgggctggatttggctgcaggtgtagtttgtgatccttgattcagacagtttagcaaggctgaaaagaacacccacacccccttgttacccacagatgggtgggactgtgttggccagag

SEQ ID NO: 1019 - DNA, 422 bp, Homo sapiens; identical to SEQ ID NO: 614

SEQ ID NO: 1020 - DNA, 191 bp, Homo sapiens
tttttttttttttttttttttttttgacatagatacttatttatttgcatatttaaagtttacacacatgctatgactccaatgttttaaaaaaataagcccttaacagctctgagacacatggcctcttctgtatcccaagcaaatccctaaatggaggtagagcacgtgttcctatttttcacactctc

SEQ ID NO: 1021 - DNA, 377 bp, Homo sapiens; identical to SEQ ID NO: 618

SEQ ID NO: 1022 - DNA, 436 bp, Homo sapiens
acacaagaacttatgtttattgcaaacaaacaaacaaaaaaaaaaggaaagagaggaaaagagaaaatggtcagaagcacaacatataaggttaagaatttaaaagcatcttacattctgccctaatggcagcataattaatagcaacaaacggccgtcttgctgcctgccgcaccggaggtatttttgcagacctgacgagcaaattttgtgaaatatgtagtatgaaggaagaaagcttggcgggtcttcactgcagactttggactcccagtgtttcggactggcattccctgcatggcctggcgggacacgtgacttctaacacgagggtcctctgtagttgggctaggagataacttctcttcttctgactgggtgggcattttcaacctcccaaatttttcccataaagccaacaaattgcacatatcct

SEQ ID NO: 1023 - DNA, 406 bp, Homo sapiens
tactgtttcatacatttattttattttcatactatttttctgtatatgagaaagaaaaagactcaaaaataaaatgtacaacaagtggaacaagcagtgattggctgacaccccacggccaagggaggctccagcaggtttcggagtagaaaggtcatcacagtatggtgcataatggagcatcatattagagtggaattcagccaaacacagtaatgtatggatgtagacgcatctgaaagaaggaaaataaagatttatgcaggtaaaaaaaaatcgataaagaaattttccccagtgtcttatgcccaattggaaagctttagtagagatttcggagctaagaaaaattttaatgccaactttgtgtttgtaaataataaatacacttggggggtgggggaag

SEQ ID NO: 1024 - DNA, 293 bp, Homo sapiens
ataatacagaaccatttgtaatcaaaatcaatgtatacatgctactcgtttacaggtgtatattcagtcgctgaacaaatctccgttagggtcgctgttcgtgtgctgggaacacacaggtcaatgaagagcagccagaaagccccaagcttctggaaggttccactctcgtgaatcagcaccgcttgatcatcctgcccgtgaaggcatgtgctttcccttccagataagttacaaagccagagcacggaagccaggccctcatctttgaacattcagagactggtccgcag

SEQ ID NO: 1025 - DNA, 300 bp, Homo sapiens
ggcctactcctctcccttctcaaagaccttacaggcaaggctgaattctaaaatagccttattagttaaaaacaacactggtataactaactcccatttctacttgaaaaaattctttggaataatgcttttttagatcaaataaaaaaatcaagctttttataatgatgataaggaattaattacaatttttaaaattctaatatagtccatacaaggcttatatactttgctctaaacctagctcacctggtctagtagctacaacatttagtagctacagtcagaaaatctaaattc

SEQ ID NO: 1026 - DNA, 446 bp, Homo sapiens
attgaataaataaaaattttattggtttggtttttaaaacctataaacaatattcttagtttgatcacttaaaacatacaactttatgtaaccaaaatgcttaaaggattttgttcactgagtgttggctatttatacctatacatatgaaaatctgacctgtcaaaactggttttgcagtagccagatttgagatatatgtggatttctaaaaggttaacttgtcaaattatgagatctaatacaacacccaggtattaagggaaaaaatgattttgcaaccccaagttgggacttaacataagaaatccttatggtgttgccaacgttaaaaattctattgagcactttcatttttcagaataaaacaggataagcaaataactcacaacagtacctcatagtcttctataaatagctaagctatactttacagctataagaac

SEQ ID NO: 1027 - DNA, 285 bp, Homo sapiens
cagtcatccaagaagtctttattttcccacttggttactgttctggagcttgtaccctctgagctctgagatggggttggggggacagtgccagggagggcctgtggggctgtgcagttgcttccctctgggctggctctgacccagggcaggatcaggcacttgagagccccccaccgagcctcattggcatagacagtcgtgcctctcacagggctcaggggaggtggaggtgtgggcaagtccatccccaaggctgtaaggaaggagcagctcctccataag

SEQ ID NO: 1028 - DNA, 262 bp, Homo sapiens
ttttaaaacaaatattttaatgcatataaaaacaaaatgacagcacagtttagagtcttcagaagtgatgggttcctgggttgctaatccggaatacgtacactttcgtgcctttgtctccatcagcagttctgacttcaagcagcagaatagaagccatctgcaaaaggatcaagacgctctggggaaattatcatggtccgcctatgctttttgtattcatcttcccggtctgcaatctttggaggtctgtgctcagcaa

SEQ ID NO: 1029 - DNA, 402 bp, Homo sapiens; identical to SEQ ID NO: 620

SEQ ID NO: 1030 - DNA, 297 bp, Homo sapiens
aaagtaataaacttattttaatagtgcaaaatgtaatctgctttccaaccaatgaaagaaaaacttgcaaaaaatttatgaaactagtcaataccttgaacaaagaaaaacacaaataactaagtaaatattacaattgtgtactccaaacccaaaaaagcagagaccgtcattacaagccaaatcttttttagagttggttgttgcaggttactaaaatgcgtaaaacaaaatctctacttttcagacttacagaaaagaaataactccaataagaaagctaacttaaggtttcat

SEQ ID NO: 1031 - DNA, 233 bp, Homo sapiens
  misc_feature: n=a,t,g or c
gagtgtggggtcagtttattgggcatgcgtcagtcagaggctgggctggccagggtcgggtagggcagcagtttgtctggaccccgagaaacccaactggaatccagggcctcatctgnttcaaagccaaagtcttcctcaaccttaatctgcaccggggccagctctggagtcagcgcatttcctgctcggcgtccatcccgtggnactcgccgcctcttccgcccacttgg

SEQ ID NO: 1032 - DNA, 466 bp, Homo sapiens
tttgttagtaattgtctttatttgcatcatgtcttttattctcaaattgattatactttgcacttctagatgtccaaaatcaacaaaaacactaaaataatgatagctagatgcttagaaatgatccaacatgccatagctcctttgtaagcagatgacctgaaataccattgccctgtccctttgtgttgccaatcaacttggccttgagacttcactgcattcttaagccattttatctctcctctcttcctccaatgtgggatgagactaactaaaactaagtcttccagtgacatgggacaaacttacatctaaaatgttgatcatcaatactttcagaagaaaaaaaaaactcaaccaaaaggaagagaaagaaacgtagctcagaagagtctgaactatataaagtatgcaaaatttatcaggcccagagagacatgagtatgagatttttgtcacatcc

SEQ ID NO: 1033 - DNA, 403 bp, Homo sapiens; identical to SEQ ID NO: 30

SEQ ID NO: 1034 - DNA, 431 bp, Homo sapiens
gcggccgctggtcaaccgcagcgtgcccaggtcgctctcgggcgtggtggtcttgatgaagtagtgcgtgtccttgccctcgatggtgaagtgcaggttctccaggtagaaggcgttgttgagcacggccgccaccttgatgcagtcctcgttggcgatgttgagcacgttggtctgcacgcggccctggctgacggccagcatgacgcccttgccgatcagcgacttgaccgtggcgaaccacagccaggactgcgcaccgcggcccggccgctcacctgcacctcggccatcttccccagcgacaggaaggccttggcttgccgcgccacttgctgctggactccgaagatgggcggtatatcatcccactgctgactcttcacaagttcgtaagaaggttctgttaaatcaaatttgggaacagggaa

SEQ ID NO: 1035 - DNA, 354 bp, Homo sapiens
tttttttttttttcaccttctaagcaacctttatttgcaaactctgaggttggacgcggtgcccgaggcggacagtgtcacgtttctctccctccactttcccctggcttttggggtgctccagcctctccccccagcccactcccgcccaaacccaaaatgcagaggagacttctctctctctctctcccgccaggcttcggggttccacggggcccatccctggcaggccaggcgtcgggtgctggtgctcgctcctctggggccagcctggggaggcagcatggcagcagtgcctgtcagggacccaggcgggggcaaggtcgctttctgagctgacaacttcaggttcca

SEQ ID NO: 1036 - DNA, 510 bp, Homo sapiens
tttgtagttgctgaaaagaagtttattgctattttcttattttattatacaaaactagatttgcttaaaacatttcccagtctctttaaaggaatgctagttagtgggaggccacagctagtaaattaccctcagtagtggtttcaagtagtccataactataaaaatcgttacggccaggatatgccggaacagaacactccccactggggtcctcagccttggatgtcagctcggcccctcaaggggtccctacacctggaagctgattccactcatcagtctcgagctgggcgcatgtggagttgatgtggagttgtagctgactggctggtggggtcagcctggcctcccagtgtggagcatgggcaccagcctcactgcgtggtcaccctagggcatatgctgcgggctgttgtggcattcctgtggccagcccagaggcaggcaggggctgtctggggtttgccatgtgcaccatcacctgggcttggggtgagctggaggagc

SEQ ID NO: 1037 - DNA, 354 bp, Homo sapiens
ttttttttttttttttagagatcataaatacttttaatatcagataaatcattaagaaattgcattctgtacttgatgaccacacgggaaccttgctagagtcaagagaacttgtcactagtaattatgaagacacctttacggtgagcgttattaaaaccctactagaggttttgggtgggactcaagagcaaggggtggccacctgtggacgagggttccctgttgttaacagaacacgttgcccacctcgcaagtatgcagcccaatcagtccccagggtctcggttcccgttgcgcccttccccatggccactgcgctcattcatgagcctagggtgatcaggcctccgg

SEQ ID NO: 1038 - DNA, 418 bp, Homo sapiens
gacagtttaactctttattctccttcacagcccagcagaccccaaggcgggcagagggtgcaggccgtccccaggatgctggtcatgggccagggtcatccttgcacctgcggcagtaggggcagcagccatgctgaagcaccagcaactcatagtcctcagaatggaacatctggaagcaggaggggcacatggtaatggaggcgtcaggcagcagtgagcggaagtattgccacctcaggggtgggggccatcgcttgatgaggacatcccggcggctcatggagcgcacacacagccggctcaccaccactggcacgaaactctgagccaccttgctcaaagctcagcttagctgtgaacgggtcctcatctccgatggagtccttggtctccactagccgcagaatctgggagc

SEQ ID NO: 1039 - DNA, 324 bp, Homo sapiens
tttttttggatggtcagtgcattttattgaatcagcacagtacaaaaataaataaaaataagggaccagggaattaaattacagccaaactgagcttcatgactttgtcagattataaaccacacatactcacaaacacactacacatacatacaaaatgagacaaatataaattaatattaacaatacccacagtttggtcaaagaatagctacagaagaaattgcactaaaaaaccaacatacatcacacgtgtgtaattagcagtttcaaatatacagctatgaataattctgagtgaaaaaaatggcacattttcttttc

SEQ ID NO: 1040 - DNA, 425 bp, Homo sapiens
ttttttttttttttttttttttttttttttttttttccactgaattcctttattcagtcaacaaacacttccagagccccctctgtactgaggcctcagcccagcccccaaggaaccctgaggtcaggggagacagctggacacagacacttccccagccccagggccagagtggggctggagggaaggacagggctacagtagtagtgggggtatatgagggaaggctgcaaggatgtggtagctggagttttgagagatggataagagttttccaaggaggcaaaagtggcagaaaagctttgcaggtgaggaggagcagcagaagcttaacctgcatgagaatccctctcaccagtcagaaagttgaccctgcacagccaaggggtaagctctgaccattttgcaggggacagaactgagac

SEQ ID NO: 1041 - DNA, 593 bp, Homo sapiens
tttttttttagtgtgactaaggctttatttagaaaggaccttaacagtttcacaaacataaataaagccttagtcacactaaattaaaaaaaaaaattccttagggatatcttagagtagtaaagtgacttcctcatataaatagtttgaaagggtacttaagtttttcacccaaattgtgatatacaaaaaggttattaccaagcaacctacatgtcaagaaagccccagttaggaaggagccacagcatttatcttgtttataatttctttggtactcccactgtttagagcacaggttgaacaccatgttcatctaagccttattagttaaaaaatgtgttatggcaaggcaaataaactagtttaaaaaacattaaatttcaccatttgtagaaattcaagttttataatagcttgctatagcagctatagataaattagtcaccttattacaaactaaacctttgtaaacaagtttaaatttaattttcaagaaccaaattgcactagtcaagagtgtaggaattttgagaatctcaacactagagtcaaagtactgtatcacttagtataccctttaaggtagcact

SEQ ID NO: 1042 - DNA, 267 bp, Homo sapiens
gaaagaataggtttaatttattagttgctctttagcaaaggctatatagaacattattggggtgaaaattaaattctagttacagattcatgaaacttgaagccaaattagttttatgagactatcaactcccctttcatcctcctacacagcaaggtacctcatagtctatataattctttgccgtttttaaatgatttaagcagacataatacataatgcagttgatattaaatatcttgaggaatgtcaatagaactactttca

SEQ ID NO: 1043 - DNA, 239 bp, Homo sapiens
gatccaagcccttgttcagatttggtgcctgataagacaggggtttctctttttgtgacctttattattattattttgttaactgttgtaaccagttagctgttgtgttttaagatagaaaggaacaagactaaaattgtaaatactttgtaaacatcagcatttgtacttgaatagtaggattttaaagggcattgatagcataccaaacaaaaggcaaaataaagtgacctttttat

SEQ ID NO: 1044 - DNA, 332 bp, Homo sapiens
  misc_feature: n=a,t,g or c
gatcctcctcagaaactaccggacttgttttctgtattggtgtgttttgtatcttgcttgaacttcctgttcttcttggtatactttaacattatnatnatgtgggattccaaaagtggaagaaatcagaagaaaatcagctagctgtattcctaaacaaattgtttcctaaacaaatgtgaaaatgtgaacagtgctgaaaggttttgtgaactttttgctatgtataantgaaattaccattttgagaaccatggaaccacaggaaaggaaatggtgaaaagtcattgttgtctacacaaaataaatgtatatggagaccaaagaccaaa

SEQ ID NO: 1045 - DNA, 305 bp, Homo sapiens
aaccatttgctcagtagaagtttaatggagaaatcgttgtttaaaacaatcagtcaaaaagaacagctcttttacaaacaagttatggcagtggcaagtcaaaaccccaggttcaatttcctattcctttcaccyscccctagaaggggcaagagsgcgggtgagcaggagagatggggctattgaaatggtagctagaggaattacaaaaatacactctgabgtagcaacagggttgtggtgaaacatgccagggggctggggrggmmcaatcagacgggaggttctggvggmaaacgragcct

SEQ ID NO: 1046 - DNA, 293 bp, Homo sapiens
ggacttcattttttttaatagatatagatatagatttatatttatatataaaatagttttttacaaaaaaatcaaccaaacaaaaaattaaaatcaacttaaaaaaacaacaaccaaacaacaataacaaaattcaaacaggagcagagatggggctgaggcataggggaggcccctagcgctgccctgaggaggagggggtgagaggctgaggcactcagtctcccttctgcttgggtgcttgcacagtcccattggccagagcagtggggttgcctggggatgaggcattt

SEQ ID NO: 1047 - DNA, 286 bp, Homo sapiens
ttttttttttaacttttattaatctttattttaaaacataaccagatgcaccttggttttttacattctctggttgccattcagtctcaaagtaaacaccgggagcatatgataaatcgtagtttaaggaagccatagcacttacagagttcctcgaatggttacaatataaaatctgtcataaaaatcagtaaaagatgcaaggtagaacacagtttaacactggtacaatggcagtagcagctttgcaaatgtttgtctatatgattccacaggactttttttt

SEQ ID NO: 1048 - DNA, 422 bp, Homo sapiens
  misc_feature: n=a,t,g or c
tttttttttggtttgaaacattttattggcaacactgatgtcatatttaggaaccatagacttttgtcagactgtgttagcttcagtgagaagtattagtggtcaatgatatttgaaatattgttaaagtacccagaaataataggcattaaaattcatttcgttcactgcaagaaacctctaaagatttcatgtcttcagtgggaactgggcatactgtaattgctatgtgggaacttaatataacctcaacagcaggcagagagaatacagtcctctcattatgcacatgctctagggatcatttattttaatgctttcaaataaatacgttccatgcagcacactacaataaataaggggncagcaatgttcttctaggtaaatccattcataatgtgaggtcaccatgtcaaaacacc

SEQ ID NO: 1049 - DNA, 415 bp, Homo sapiens; identical to SEQ ID NO: 49
  misc_feature: n=a,t,g or c

SEQ ID NO: 1050 - DNA, 371 bp, Homo sapiens; identical to SEQ ID NO: 633
  misc_feature: n=a,t,g or c

SEQ ID NO: 1051 - DNA, 357 bp, Homo sapiens
  misc_feature: n=a,t,g or c
ggtcacaatatgcatttattaatgaatgtatttatacacaatacaaacgtgcggggacaccgtccctttcacagcccagaacccagggtcagaagatgagggatccagcctcagaggggagatatgcgacttcccaagagcagttcttggcctgggaggggccatgagagtgcaagacacggggccgtggcggnggcggggctacgggagcggggcgtggccggcccctgaggttactataggggaatgggccccggcaggtccccttttctttggggcanttgggaagacagcggggcccacggccagnagctncttacacgtgggcgttttntgccctatttttncccaaagntg

SEQ ID NO: 1052 - DNA, 383 bp, Homo sapiens
  misc_feature: n=a,t,g or c
nntttaaaattattaaggataattttattatcaggatattatcaggataatgatagcagaacactaaacgaaacacaagctagggccatatgtgactgcaggggtcacatgcccacaaacagctttgaactcatccccttctgggcctttctcaatcctgcccaccttcaaaatcaagtgaaaggcttctgctgggtggatgaggaagtgtccatggctctgagcctctggtctggctctgccccaggatgggccaaagtggctccctcataggcactttgtaggacttccctggaggaatggccttttatctcctattagtttataagtttcctaaggagaaaggggctacaactntcattcatcctgggaatcaccacatg

SEQ ID NO: 1053 - DNA, 457 bp, Homo sapiens
  misc_feature: n=a,t,g or c
ccatcttttaaaaaatgctttatttctctgggcaggcttcatcggaatcacaattttcattcatttagtaactgttggccttgtatccacccctctctggcactcaggtctcacttaagagctggctgtctgagctgtgatttgcgatcagtgagatcggagacagaggcagccctagncagtcatgttttgttccacctgaccctgggcgccactccccctcccaggctacaggcaggcatgggcaccagccangggagagacagctcatccatactctggcccagcagaaactctgggcttagacaaaactgctcaattgaggacaaactgggcaaagtagaatctttctttgggagtttttagaaatatggtggggtggcatttgggaataataagaatagtagctgggcatggtggtacgcgcctgtagacccccagctctgggaggctgang

SEQ ID NO: 1054 - DNA, 445 bp, Homo sapiens; identical to SEQ ID NO: 638

SEQ ID NO: 1055 - DNA, 496 bp, Homo sapiens
  misc_feature: n=a,t,g or c
gccagtcagaaaatgtttattgagctcctcaccctgctccccatcctgggcccatctgaggaatattgagcacccacacagagggaccaacaaagaaaaggaacctggtggggttccagaaggaggagacataaggtggacatggtattcatgagaaggaaggggcatcaggagcacacttgggtgaggatctacaggagtaacaccaagaaaatgctttagaagcagggtctcactatgttgcccaggttggtctcaaactcgtggcctcaagcgatctgccagcctctgcctcctgaactgctgggattacaagtatgagccaccacaaccagccccgtgtttcatgagctgttactccattccaggagcctatcacttgggccccctctggattcttgaccaaggtgtccacctccttcatgaaccggagacacagctcctcttcccatggcaaagcaatgcactncacagtcancagaantccgacngattc

SEQ ID NO: 1056 - DNA, 390 bp, Homo sapiens
  misc_feature: n=a,t,g or c
gttttggctattttggggccatttgcaatttattattaattttaggatcaatttgtcaatttcaacaaaaacattgtaaatttgaaagggattacattgcatccgtagaccaatttgtggagtactgccatcttaacaatattatactttccaatccatgaacgtggaatgtcttaccatttatttagatcatctttaattttttttttcaccaaagttttagttcttttgcttgtttcgagacagggtctcactctattgcccaggctggagtggaatggcaggaacacagctcactgcagccttagtctccctgggctcaagtgatccctccccaccacagcctcccaagtaactngggacccacaaggaagcttgncaacggggncc

SEQ ID NO: 1057 - DNA, 462 bp, Homo sapiens
  misc_feature: n=a,t,g or c
tacagaatgaaagaatgttgcatataattccattttaatacagaatttataaataaaatcatagtttatacttatagcatttcttcatttttagtgtttttttttcaagtgggttaaacagatctgtgagtaccttgagagttgtcatgtagaataagatcgctaagagggcagagtttgggattccctatgtaacttcagctacaacagccttgctttatccattgtattcattcagcaacaaataggtatttgtgggccaagtcttgctttagccgatgtaatatgtctatgtgatataaacatttttttgaaaaataaataaagaaaaagttcaattaacttaaaaaagagcttaagaaaagctttgaactggatgaaaggtctttcatcagcagaagagagagaataaaaggggcngggggggaggttcngaaaattttccaattagggatttccctt

SEQ ID NO: 1058 - DNA, 424 bp, Homo sapiens; identical to SEQ ID NO: 63

SEQ ID NO: 1059 - DNA, 560 bp, Homo sapiens
  misc_feature: n=a,t,g or c
aaagttcatagagagtttattagccataagagctgtttatttccatactcatgaatcttaaactgcaattctctctctattcaacccaatcctggtagaatcatgtttttcttcctgaaggacttgtatgtactggaccagtaagaacctttgcctgttgtctgtagagaatagtcgatgatgtttcatgttcctgaagatgaaaatgttcatcatttttaggaattatagttaaatctggcaagtgcttcttgcttttttctttttcttgtacctaaacattttttgaatcataccaaattctcagtttctttgtttcaataagcaaaaatggaaacaaaataacttaaaataccactttgcaggntttgttaagtaatccttcataaattgcaagccttcngaggggagggcccttcccnaatttggtcccagcacctaacatagngtgggtggccccattgcaggagcnccattaatccttggccgaataaaattaataagccatggacnccgggaagaccncagagccnggacnaagtgggaagcngaccaaatat

SEQ ID NO: 1060 - DNA, 428 bp, Homo sapiens
  misc_feature: n=a,t,g or c
gcaagcaaaatattttattgaaaattcagaaaagttacaacactttaagacagcgtttttcatattctgttataaagaaaaatgttaaaagaattgacttgaatgttatatttaggtttcattcaaactaacaaaatcattttgaaaaacaaaaatccacccacagctgaatttattcagggtgtaaacatatattttcctatttgttatcaagaaaacgctaatgaaatatttttagtgttcttttcaaaacagcatctttctggacccaatttaaatagtaatttacgtattagtatctagttcacatagattactgatttgtgtgtgtgtctgcatatacttgtgcacgcatgcatgtaggaactagctaattttaatatgaaattttaagaatcnagagtgatttgcnatttcacttatcatag

SEQ ID NO: 1061 - DNA, 428 bp, Homo sapiens
tcactgtacatagaatttatttgtttgcctcatacattaaaaaatcggaatagtgcaattacctacaaataatttcaatcttctcattcgcgagttgcaaagtttaaagagaaactttaaattgctttgggtttacgtttttaaagacacactcagatttactaagagagcatatcagaaaccagatctaaaatgttaaggcataaactttaattatcaggtctacttcttctgcccctctaatgccagttctgcagatcgctcacaccactccaacctacagctaaagaatgaagtaaaacaggtacacactaaatttgggcatttaactgctgaaagaagtgttagaattttttagggtgaaaaagttatctgtatcaattatcttacacaattccactccttccttcaagaaaaggaatccaatg

SEQ ID NO: 1062 - DNA, 418 bp, Homo sapiens
  misc_feature: n=a,t,g or c
aacctagacaaaaagaagaaccaagtataataaaaaaaatcaagaaacatgacaataatggagactaaatccctcgatggaaagaattataatcataaatgtaagccttaaagagttaactttagatgtagacaagtcaaactgaagcactaaaaacatgttcgaccttatataacacattccttagggggaaaaaaagattttttaatattggaaaaaatatggttaggcatagtggctcatgcctgtaatcccagcacattcagaggccaaggcgggaggactgcttgagcttaggagttcaagaccagcctgggcaacatagtgagaccttgtctctacttaaaaacctaaaaagattagctgagtatgggtggcatgcacctatagtccccggctactangggaagctgagggc

SEQ ID NO: 1063 - DNA, 371 bp, Homo sapiens; identical to SEQ ID NO: 640

SEQ ID NO: 1064 - DNA, 382 bp, Homo sapiens
ttttttttttttctaataaactgtcttatttttattttcatgtttccttcttttcccagcattgcagttttcatgaactctgctttttaaaagttacttttagacaatgacagtaatctaggacccagaatggactggaccagctgatacagaatgcacgatgttgtggaatgcttaatatctgaaggcactgtatgtgtcttgccctgtgttctctgaaataatgtttgaaatttaatttgggatgatttgtttttgattctttcaggtatgggcacaaatgccgaaatgcactgcaatacacattgtttatgcctaaaaacaaccggaacataggaaatgatggtaaaaggtgggacactgtgctgctgtaatgcccggg

SEQ ID NO: 1065 - DNA, 476 bp, Homo sapiens
  misc_feature: n=a,t,g or c
aaanncanctttttattgaacacattataaaacaggtttagtaaaaagaccaaagcccatgtcatcatcagactccncagattcttctttctttgcttccattttcttctcctcagctgaagcagcagcaatggagggggcaggacctcctgctggtgcagcaccagctgctagagcagggtccaccagcccctacattgcagatgaggcttccaatgttgangttggccagggnctttccaaanaagccaggncaaaaggttcaacatttacantgggctgctttaatgagggtattgatattaacctccatgatgatcacctcgtcatcgtgcagantgagggccaagtaggacacagggcaagctcggagatgggagggccatggcgccggggcnagtttgggggcttgacatttgccagaggtggtngttantcactgggatggaagttgatgggncttaccccantgtttt

SEQ ID NO: 1066 - DNA, 433 bp, Homo sapiens
  misc_feature: n=a,t,g or c
aaaaaggttttaaatgtttaataactcctggagagataaaatgccaacgtttaggtatatttatgaattagaagcttccaaattgatatggagtaaagcagtgtcagatttttaaagtaagggttgaaacttggtttgccaaagctttcagggtgaaatcaagacaatcaagtactttaagtcaccacatccatacctaaaacatgctggcctgacccaagcttgaggtcctcagactgaacaggtgcaccgctgggatgctttcaagctccgggacggaaccgcctaggctgagtgctccggggagggaatgccgctgncccacatagacttggtgggtacttaatccaaaggnaattaaggcattttccagtccaggcgctttttaaaatggcacctttttgggcacngggggngatttttccccnaaaag

SEQ ID NO: 1067 - DNA, 328 bp, Homo sapiens; identical to SEQ ID NO: 69
  misc_feature: n=a,t,g or c

SEQ ID NO: 1068 - DNA, 178 bp, Homo sapiens
  misc_feature: n=a,t,g or c
tttttttcacaacatggttttggtttaacagcagcttaaaaaggaacaaaaaggaaacctctcatgcagacacatcaggtggcataaaacaataggcaattccacgcgganatcanttagccattctctctgtccgcacacaggactctggctgcacctcaggggcagagctgctttc

SEQ ID NO: 1069 - DNA, 463 bp, Homo sapiens
ttggctttcaatgcttcatcagcttttgcagcagcttcaagaaccagctgtagtctggctttggctgttcagctggtggcagatgttctaatccagctttgatgtttccagattccccacgtttgatgttatgtaattccttgtccttccctttatccttctccttttctcttttctctttatctctgcccttacgtcgttctctatcccgagaccgactacgcgttcttctgtgactggacctttcactgctacgactatgagaacggagacgaggtcttgacctggaccttcttgttctgctttttgacctagacctctgaactctataggatttccctccgacccctttgaacgacttcgacttcgtttccttctggagccataagaagagctactgcttgatcgatgcctgcgtcttctatcataagaatgtgaacgaggctgaagatctctggaccaa

SEQ ID NO: 1070 - DNA, 427 bp, Homo sapiens
acaaaaacaaataaggatttttatttgcagtactttccactcttcctttaaaaacttgccatttgcttatcagttcctctggggctgacccactcaaacaagacaaaggataaagaacaaaagatagtcctccgaggttacaggcttggaagggcagagaggagctacgaaccttggaagaaaaacaaggtgctcaggaattcatcgcctaacatttcacttccccacccaccccttagtgctcccactttggcagtgatctctctttggctttaaagagaaagggggaaatgtgccttgttttgcaggtgtgcaacaacacagctctggcatctcaagcagcaggggagaactctaagacagaagaatttcttcatgaaaatcacggtatgttatcacatactgtctccatggcccatacaaggac

SEQ ID NO: 1071 - DNA, 454 bp, Homo sapiens
  misc_feature: n=a,t,g or c
caatttttaaaaatgttttattacaaagcttcttttaaaaaaatgctcagcacattaactcaaactggaatgacaaacgttaggatgacagttttgggcaaaggctgtgcttgcttttttaaaaaatgggtacatcaatgctcattttaacaactnggcataaaatcccactaattggctaataaaaacagatacaaatacagaacatttaaagtaataacaattcaagtgctgggctttttacaacaagggggtgataaggaaagaaatgaaaattcactgcaaaccagtctgctgaacgcatctgttaaggtttactgtttaaaaaaaaaaaagaagaaaacagaagaaaaaataaactgaaattagggctgccaattgctaccaacagagtgggtttggctattacatttatttagctctactggaacaccttacaagggcggagaagcca

SEQ ID NO: 1072 - DNA, 396 bp, Homo sapiens
  misc_feature: n=a,t,g or c
ttgcataaattggttcagtcactatttattagttttaaaaaaatggtttttaaaagctgcaaaccatacacatttctgaatcaggaagaggtaaactgtgacatagttcccctgtgctgctgattcttttggggagaaaaaataagtttccaaattctatttttaaaaaaactagaggttntttttctatgattagccttcactcgaaagtccctttnacccaaggcatggtccctgggtcatctttttgacggcttagtttctgggaagttttcagtaaaccgctctcgtgctttgtcccagntttttttgttcttgttttggagaaggtgaacatcttcaaatcgaggatggtttncctgtccccaagcctgcatgtgttcgccgaagctgaag

SEQ ID NO: 1073 - DNA, 299 bp, Homo sapiens
  misc_feature: n=a,t,g or c
tgattggcttaaatgccaatgtagtttgtttctttgtctttgtacctggttctcttttctgtttcttttctaatctttgttttaggccttctagttccacaccatcttcttgagggcttccttcagtattttcattcttaattttctttttatttttcttttctgcctctgctttcatttctatggttantcgtggaangactcnttgaccacgcggagaaggnaaaacttcaggcannttgnggtgtttttcccccttggnccttcccccctttccccagggaagncgaacttgntca

SEQ ID NO: 1074 - DNA, 392 bp, Homo sapiens
  misc_feature: n=a,t,g or c
tttttttttgggtgcaaggaacattttattccataactgtctccaccgaagccgcagaagcaaagccaggagcagaatccattctgccagcgctgggctctggggagacatctgtgccctcaccatggaggacagaaggcaggggctcccgactccttggtcctgcctggggtgctcctgtccctctttcttgctgggggacctaccccaccctccccctcccacctcagccacagaggaacaagggagacaaactgagggctctgcagtccccgttcaaggccaacataatagtcgtgtggccccagcccagctaggcgcatcctctncggcatggcagcggtgaccaagcacagccaacgtcagctccgctccctgccgtctgagagctg

SEQ ID NO: 1075 - DNA, 417 bp, Homo sapiens
  misc_feature: n=a,t,g or c
ttcccaaagtgctgggattccaggcgtgacacccgcgcccggcccacagttttattctttacaggaggtcagtgcccatcatgttccctgtctacagacaaataaaaagctgctctctccagaggggcggcanagtcctgatggtccagtgagacccagaagcttccaggagaccttcagtcccgagtccctttcagtcatcatcttctgagtctgactcttctgtggactcagatgcgctctctggcaagtcgtctcccatctgctggaaccttcccgactgtgaatcccacatgtatttgatggtcaccttgaattcagccatctcatacccaaaaagcttcaggacgcgagcctgctctggggtcagcacatcgccctccttgcacacctcgtaagtcagacagcagaagtcac

SEQ ID NO: 1076 - DNA, 410 bp, Homo sapiens; identical to SEQ ID NO: 648
  misc_feature: n=a,t,g or c

SEQ ID NO: 1077 - DNA, 279 bp, Homo sapiens
  misc_feature: n=a,t,g or c
ttaatanagtactgccttnaatttttaatgcatatatgttacagatttggttctccaagaaacactgaggtgcagtttagcagggggtctatgaaggcacacccttcgatcaanacctgagaaagggaacangantgagncagaggtntaagttgagttgcaatgcagatccaaagacagtgtccctaaaccccatagggagattgtggtgggcccagcagagttgcccaccactcacgtgctgaagtggccaggcctttctattctcacctccaacag

SEQ ID NO: 1078 - DNA, 356 bp, Homo sapiens
ggaatctcttttgtcatctctgtgccgcctatcatctttgtcttctttatgtttcttctcttctacctctcccctacttctctgttccttggacctttctcttgatcgctctctctctttttctcgttcatttcctctttccttatcatagtcacgatctcgtcttctacctctctcattttctttctctctttctcgatccctgtcccttctatcccctttcctatcacgacttcgactgcgacttctatgcctttccctacttctgctgcgcctgcgttctaacccccggtcaatacttcgggatcttcgccgttctttctccctttctttggcttcacgctctagtcgctggg

SEQ ID NO: 1079 - DNA, 407 bp, Homo sapiens
cacaaatgtcaaatgttaattttatccaaaaacacccccacagacacactcagcacacacagtgtcactacttactctcagattgctctccagactgggggaaccaattgacaaggcccccagctcccccagctatgagactacattccccataacttttcagcatgttcacttgattctccaaccttaacagacttgtgatattactttaatggcaaacaaggctctgctgtcccacgcgcttactttgccacatggcacagtatctgtgtcacagacgcactcttcacaaggacaggtccaggcctgtgtcagtcactgcttcatcccagcacctagcacagggcctgactcatggtgagctgtggacaaacgcacatgcaattaacgacttgttcctgcctcag

SEQ ID NO: 1080 - DNA, 409 bp, Homo sapiens; identical to SEQ ID NO: 653

SEQ ID NO: 1081 - DNA, 384 bp, Homo sapiens
ccgtgtcacttctcacttctaaatagctctagacttggtcccattgcactaacttaattcactctccatcatctttggcttggagtacaactccgtccttccatctaatctgcctgtctccaatcgttctcccctttgatgtgcagggcagccactgatctctctaacatttacagaagaatgcaccacttgggttgtttaaaacccttcaatggcttcccattgccccaagttcaaactctgcaatgtggcctacacatctctctagcttcacctcctgctcaatatcctacagcacagtgaagttcttggtggtcctcaaaagggccctcaaacttcaaacattcccttcaacctaaaatcctcaatggacattactgagtc

SEQ ID NO: 1082 - DNA, 250 bp, Homo sapiens
  misc_feature: n=a,t,g or c
gttatttagtttttatttcataatcataaacttaactctgcactgctaatctcctggggggagaaaggggcctatattgtacagacaatggctgggacccctgacattctggcactttctttcacatggntacaccatcctccctcctccttcacagggcagagggatcccaagtttcctctatcctctgctagtttttgatgttccctttatttagaaaaacaggcaactatctgcattgtcaaacaca

SEQ ID NO: 1083 - DNA, 415 bp, Homo sapiens
tttcgtgtgaataaacgattttcctttatgtggaatggttcagagaacgtgggcgtgtgcacacaagtgccctgttccggagactggtgggtgggggttctagcaggctcctctcctgcgcagggggtctggggctgcggcctcactgactgccttggctcctcctctgtgcgctggtcctctgctgctctttatggaaaatgtttcctgaagatcttccaatattttgaaggatttggtccagaatggatagattttcatactgagtgttctttgaattcttttctttactggaaacactcttctcactgccaggagacacctgtggcccacgataattctcagaaggatcgccatggagatttgcattagcattggcttcatcattggaaattttgacctcaatgccaggaga

SEQ ID NO: 1084 - DNA, 230 bp, Homo sapiens
cagggaaacagacaggatggaaaaagacaactgaatgccctcaactgaatgtcttcatcccctcttgcctgaaatttccaccttcccataggctggggagggagtcagttccagagcagaggagggtgacagggttgaggagggacttgtgagagctagaacttggcaaaatggcctagcccacccttcaaaggggaaaagagggaggaacaggggatgaaaagttgtcc

SEQ ID NO: 1085 - DNA, 384 bp, Homo sapiens
ttttttttttttttttacattaaaatgtaatttatttgcagaagaattgtctccagccctgtgcgcttgtgggattgggaaaacatcgtttttaaacacaaaggatcaagaagtactccttggagcagcattaataggcaccaatactacgaactagaatttagagccttgccactggccagcgctggggtcagtcgggagcatgccagcaaggctgaccctcagtttcactgaggccggagtcataagcagcactttaaagatccctgggtaatttggatgcattttgagatgtgagccgcatagatttaaggtactttagcattctgcagctttcacttattgattgtatgattcccaccgtctgaccccagcagtcttcac

SEQ ID NO: 1086 - DNA, 348 bp, Homo sapiens; identical to SEQ ID NO: 663

SEQ ID NO: 1087 - DNA, 359 bp, Homo sapiens
ttttaaagatacaacactatttatttttttatttatgtcatgtcgggtgtgggatcttgagctctggcagtgatgatggtacttcctgttgtcagcccctcaagcccagctgcaaccagtctggggccattcagccagggacagagcccacagagcccatacacctgtctcccaccagcggggccctcctggcagggtagggaaggaggaccccgggcacccccctcagggcctgactcacgtactgtagtttgcactggacgcccgggccctccctgtcccaaagcccccttgtgagactcgtggctgctgggggccaataaagctgtgtaacttgatcgtgggtgtggctgggcgca

SEQ ID NO: 1088 - DNA, 494 bp, Homo sapiens
ttttaaagatttgtctacagttagacagggaagccaaggtcataactacagccagaactgtagaggctagacacctatgaggtataatgtattctattcaaactttgtgtgaaatggtatatttaactcacctgtcttgttggcatcacctctccttaaccctaacttcttgcaaaccctttaaagcatggacttgggaaatgtcagtgaccacctgccttctctgaccaggttaaaaaggctagccaatgcttgtgtaaaaaaaagaacaccacatattgttgtattatatgcaattggaaatgttcagttatcgcactttggtatccttttcagaaaaaaaaaaaaatctcaaaacttataaacataagcatggcattttacattgtaccaactgagtaacagtaaatagatgaggtgtgaccactataacttcttgaccaactttctatcttgaaactacacacatccaccctaccagctaccattctaat

SEQ ID NO: 1089 - DNA, 408 bp, Homo sapiens
aaagtttaccataattttattgtaatatcagaatcacataagatatagagttaagcagaaaactgatgaattttcttcagatgatctttaagaatctcaaaagccttgaagtttgctatcttctactgtcttattagaaggataaaaaactttgaatgaaaatccacttcttggaaaagagccagggtttatgcagaggcattcggtatttgtcgtagtgaaaggatcatatttgtctgcaatgacaagtagatcgggcacaggatacactctcaaagcatagtcatatgcccaatacactgggcagacataaagaggtaggggagtcagatgtccttgggataagatagtctttacaaagtgattaggaatagccaaattgctgctaggaaaacggacgcagtttct

SEQ ID NO: 1090 - DNA, 174 bp, Homo sapiens
ttttacatgcaatacttttattttagacatgcaaggaaagctatttcagaatctactaatttaaagcaagcagctgtatacagacagcaaaagaagcaacattttgttacagcttagcacaaggcatccaacacaaacaggcatgagacaatgcatatttatgtagcattaaaa

SEQ ID NO: 1091 - DNA, 320 bp, Homo sapiens
tttttttttttttcagaagaaaaaaatgtttaattaaattccaatgttcaaaactggatagtgtgtatggcaggtgatttgtacatacatgttactcttcatcaaaattgttttccatccctgtgacatcaatacaaactgcagctatttggttccaaaccatagcaagatacattctattttttaaaatgtaaatggtcatttaaaatagaaataattcttttagacgtactgcatttttacaaatgtgattttggaaatatattgctcgcaaagggtaattttaagagaattgttgagattctaatcccatctttatg

SEQ ID NO: 1092 - DNA, 458 bp, Homo sapiens
ggctttacaaagatcctgcattttattttgttattctttcaaaaagaactcaatacaaagtcaatataaaaaaatcaatactcaatttaaaacagaaacagtaatttctgaatgtctaacattctcctatgcaaagactgggagaaagaggaagggggagagagaaaataaattctttaatttaaacctttcttcaccctgctgggaatgcacatgccagagcaaatgaatccagcttaaccccttctggactggtcattgaagatagggttggaagaacagtattttagaatggtgatgaacagtgtcattattaactatatgtacatacacttatggcacttggaactgcactgtatccatgacgtagcaacctctgacacagcccgtctcacacttgccatctcttaccccatttcccaaaatatttcctgagaaagatattgtaaggaacttcc

SEQ ID NO: 1093 - DNA, 313 bp, Homo sapiens
tttttttttcaataaagggacaaaatgggtgtatgaacaggttaatgcagacaactgccaaaaaaacacagacagtggtttttccaatagaacttaacaaagaccagaaacaaatacaataaaaagccaggttgtaatgacctttggtcaactaaataaaaaaaaaaataaaaacaaagaaaaataaaagatcaaattaagtgcctctgttttgaacagggcacataagcaataataaatagtgactcccatagtaaaagataaaatttcaagttacgacaaacagctttcattacaggaatagaaaaggcca

SEQ ID NO: 1094 - DNA, 335 bp, Homo sapiens
tttttttttttattcaatcaatttttattgagcacatcctacgcacaagacacaatattaggtacagaaaagctataaagataaatgtgacacattctttaccattaataataatatatattatctaaaatttaatttgagctaatatataactgacaatgaaatatttggaccacctaaaacaaggataaattattctgtgacaagtttatattcttgcattatgcaaaaatgattctaaaataaactatttttttcccagaaattgtatgagctatacattgctatgtaacaaattgccccaaatttagcggcgtactacaacaaacacttct

SEQ ID NO: 1095 - DNA, 473 bp, Homo sapiens
tccaattcttgttgaaagtgctcaaattcctcctgacacttttctttttccttttccgaaatttctttatctggtgtgggcggctcttttccaggttcagtcaactggaaagtcagaaaagaaaggacatcatggtcatctgcaagacctccagttgcagcagatattccaaaatgcccttgtgcagggataatcatattttccactttggcacaaaattcataatcatttttatctggtgtaaagccattattgatcattactgtcagtgtgttctggtaataggtaatctttgctcggacaggatagggtttgttgcggaagtccctctggcaacttgccaaagcttgactagccccgtcattttgatggtcataatggatttgtccattgttgcctataattactatagcaggattatttttctttccatcattgtcaaaagaatcaaaaaatattccaacaccattcca

SEQ ID NO: 1096 - DNA, 460 bp, Homo sapiens
tttaaatttaaaaatactttattgctaaaaaatgctgattatcaatctgagccttcggtgagtcgtactctttttgctggtggagggtcttgcctcgaggttgatggttgctgactggtcagggtggtggctgctgaaggttggggtggctgtggcaatttcctaaaataagacatcggtgaagcttttcgcatgagttgactcttcctttcatgaaagatttctctgtagcatgcgatgctgtttgatagcattttgcccacagtagagcttctttcaaaattggagtcaatcctctcaaaccctgctgctgctttatcaactaagtttatgtaatattctaaatcctttgttgtcatttcaacaatgttcacagcatcttcaccaggtgtagattccatctcaagaaaccactttctttgcgcatccataagaaacaactcctcatctgttaaagttt

SEQ ID NO: 1097 - DNA, 251 bp, Homo sapiens; identical to SEQ ID NO: 676

SEQ ID NO: 1098 - DNA, 354 bp, Homo sapiens
  misc_feature: n=a,t,g or c
aacctttacttttcattagaaagaacacagtaatgtaactggatgtgactttcagacatccctaaaagaaaagaaatgcttgcttggagatctgagcaagtaggtcctggnagaaataatataaaataaacaacttgccaactgttgggaagatttggtttgaatatttaaaattacctatcaacttagaattgggcttattaaatattccaatcccagaaatgaccatcagctaaacaagggtcaaagccagagtaatctctgagggcccacttcccagagagctgcccctttccttcaggcantaccgctgggcccgggggttagggcaatttgtncacgggcccttagggg

SEQ ID NO: 1099 - DNA, 321 bp, Homo sapiens
  misc_feature: n=a,t,g or c
tanncacttatagccaatatttaataatcccatattanctgatgtgtaaaacatgtctttatganctgttaccacccaaaagantgcatcataactttcaagantatgtcctttgacttctaacctctgcccttctttagaattacctttcctgcggccagtacatgctccttgttaatgactctacatttactcgcacaagggtttgtccgggactctnctgctaatcgatgaacaaacaggtaaacaggttcagatgggaccantaaggtcaccanttttttccaggacgaagttgagggcttctttcggnttgaagga

SEQ ID NO: 1100 - DNA, 419 bp, Homo sapiens
  misc_feature: n=a,t,g or c
ngagccagaaaaggattttttttaattcaagtaactgaaataggaaaccagagggggagccccaggctgggataaatcatggctacccctccccaacagaacagggggaggaggtggcccctacacccattatggtcgattcgggcccccttgctcactctgctgcagcatcctagaggcagggccccaccttccctgggactggggtagtcggtcacccagcctgcattgccccagcccctnttccccacaaagagtatcttgggggagggnttcgtggggcagaacaggagggcaatgagggatgaacattgctcaaactcctttcaaaggggcacctgaccgcacaggggaggntgggcaggaagggcaagggntgggggatgccgtntaaggagggcggangcaggcanttttgg

SEQ ID NO: 1101 - DNA, 443 bp, Homo sapiens
gagacggagcctcgctctgtcacccaggctggagtgcagtggtgtgatctcggctcactgcaacctctgcctcccgggttcaagctattctcctgcctcagcctcttgagtagctgggattacaggcgtgtcccacccggctaatttttgtattttttgtagagacggggtttcaccatgttggctaggctggtctcgaactcctgacctcgtgaccgccttggcctctcaaagtctgggattacaggcgtgacacacgagcccagcccctccttaaaacagtttctaatcagatccgttattttacccaaatgggttgagggaacaaaaaccaaccctcatcaccctatttggtgaaaataaatataaaaaaagatgatcctctcttaaagggtcaccttccttcaggggtttgtaagactcagcactttaaaaagcttgaa

SEQ ID NO: 1102 - DNA, 508 bp, Homo sapiens
  misc_feature: n=a,t,g or c
actaagttataaaaaaaaaaaccccatcaccaaagacacctgtgcacaagtgtctgtcccttctgtcaccaacctagggcactacacccttcccaacatcatgaccctactgccaggtctacagattttgtaacactcaaagtgtcctgcattaaaaagcacgtgtctatttcctacgtgaaggggccaagggagccctggtggccaaatatcttcacccaggactgggagggcggcctcgatgacaaccaaggggtggatgctgacactccatcccaggacaggtggctgggtaggattccctgagcccctgacagctgggacatagggccaggacttgtacccgaggcagctgggcagtgggcagtcacattccagtaggccctgaggaatccccaaataagtcacgctgggaggaaagtgagacnccaaaacagaaacatgccctgccatccgggcgtggctcantctgtcttcgcgcagggctggttggcatggtgctacactc

SEQ ID NO: 1103 - DNA, 354 bp, Homo sapiens
  misc_feature: n=a,t,g or c
gngaacgtcaccggtttaccttcacgtggccattctcctgtccgttcgctttggaaggcncgaggcacagcgnctccccaggcctctccgcggcggcttctcccttcgctgcggtcttggagaactgggcacccatgctggcttcttcaacaaagaaactcaacagatccaagaggggaaaagaagagcctcgggttggtgtaacgacggggcgagcagcaagcagcggcggcggcaacaagcggcagggccacacacaccggagggagggggggttgggggttggtngaaaaggncaagaacagaacccattttaattacacttcccgattaaaaaattttttagttccgagg

SEQ ID NO: 1104 - DNA, 341 bp, Homo sapiens; identical to SEQ ID NO: 68
  misc_feature: n=a,t,g or c

SEQ ID NO: 1105 - DNA, 377 bp, Homo sapiens
  misc_feature: n=a,t,g or c
gtgaattgatttttaatagcaaaatggcattttacacagaagcagctacattcatggatgaaaacaaaaatccaagtgacgctcctttgttgaatccatgtaaaaatctgatttttaatctacagagaaatttctacccacacattcggtatcccctgggggnaatgacatggaaaacaaacatcttttctggtctgttaaagtaaaacaatggggncccnggggataggactctcaagaggggcctttgatgggaatgggaaccagtccccccaccccggaaaggcatccccccagctcaatatggtcacccntttacaccnggcacagcccctcacattgggggtccccnggcaccaaccctttttagggaaggg

SEQ ID NO: 1106 - DNA, 341 bp, Homo sapiens
tttttttttttttttttttttttttgttgtttcagaataatatgcaaaagggaagggaggaaacagcacaaagtatatcatatttttacacatcagacaccttcaggaagaaaggacatttctcatcttagtgtgacagactctggccaatatcccctttgaacatctgctttcgctggttggtaaaaaagtgtcattttaaatttagtgttactccttcaggctattccctctctcttcttacttgcagggccaaagcaacgtctctttccaccttggtcaccttccaacaacgatttcttcggacgcctttgttaatcattccgtccccactgaaccac

SEQ ID NO: 1107 - DNA, 575 bp, Homo sapiens
  misc_feature: n=a,t,g or c
tttttatggtcatttttaaatttgattacccatttaaatccagcagccaagtggtttcaacagactttctacttgaggtgaaaataataacactacaaacatatggcagagcttcgtacaagcatttcactcacagaggagtttatgttttcgaggatgtaggaaaagattttccaagtgtgaaaactaaatatatacaaaagcaatacattttgttattagttaaataaaatgtgtctttaaatatggaattctttgaaaaactcacttcatcgtccaaaattatggagactatttcacttttttaatcaaagatggaatattcatcacagttccccaagggattttctaactggcctgggcaaggagttcacttgtagagtgtagttagtgaaaacatccagtggccaagcctcatcaataactgtatccaaaaggagacgctgcttggggtgtacccagagaaaacaccaagctttcctggcttccgggcctccctcttcccattagtcttggggtgctccatagtgtgtgtgaagcncttgggttagaagacttgcacccatgattgagaa

SEQ ID NO: 1108 - DNA, 2474 bp, Homo sapiens
aagatattaatcacggagttccagggaaaaggaacttgtgaaatgggggagccggctggggttgccggcaccatggagtcaccttttagcccgggactctttcacaggctggatgaagattgggattctgctctctttgctgaacttggttatttcacagacactgatgagctgcaattggaagcagcaaatgagacgtatgaaaacaattttgataatcttgattttgatttggatttgttaccttgggagtcagacatttgggacatcaacaaccaaatctgtacagttaaagatattaaggcagaaccccagccactttctccagcctcctcaagttattcagtctcatctcctcggtcagtggactcttattcttcaactcagcatgttcctgaggagttggatttgtcttctagttctcagatgtctcccctttccttatatggtgaaaactctaatagtctctcttcaccggagccactgaaggaagataagcctgtcactggttctaggaacaagactgaaaatggactgactccaaagaaaaaaattcaggtgaattcaaaaccttcaattcagcccaagcctttattgcttccagcagcacccaagactcaaacaaactccagtgttccagcaaaaaccatcattattcagacagtaccaacgcttatgccattggcaaagcagcaaccaattatcagtttacaacctgcacccactaaaggccagacggttttgctgtctcagcctactgtggtacaacttcaagcacctggagttctgccctctgctcagccagtccttgctgttgctgggggagtcacacagctccctaatcacgtggtgaatgtggtaccagccccttcagcgaatagcccagtgaatggaaaactttccgtgactaaacctgtcctacaaagtaccatgagaaatgtcggttcagatattgctgtgctaaggagacagcaacgtatgataaaaaatcgagaatccgcttgtcagtctcgcaagaagaagaaagaatatatgctagggttagaggcgagattaaaggctgccctctcagaaaacgagcaactgaagaaagaaaatggaacactgaagcggcagctggatgaagttgtgtcagagaaccagaggcttaaagtccctagtccaaagcgaagagttgtctgtgtgatgatagtattggcatttataatactgaactatggacctatgagcatgttggaacaggattccaggagaatgaaccctagtgtgggacctgcaaatcaaaggaggcaccttctaggattttctgctaaagaggcacaggacacatcagatggtattatccagaaaaacagctacagatatgatcattctgtttcaaatgacaaagccctgatggtgctaactgaagaaccattgctttacattcccccacctccttgtcagcccctaattaatacaacagagtctctcaggttaaatcatgaacttcgaggatgggttcatagacatgaagtagaaaggaccaagtctagaagaatgacaaataatcaacagaaaacccgtattcttcagggtgttgtggaacagggctcaaattctcagctgatggctgttcaatacacagaaaccactagtagtatcagcaggaactcagggagtgagctacaagtgtattatgcttcacccagaagttatcaagacttttttgaagccatccgcagaaggggagacacattttatgttgtgtcatttcgaagggatcacctgctgttaccagctaccacccataacaagaccacaagaccaaaaatgtcaattgtgttaccagcaataaacataaatgagaatgtgatcaatgggcaggactacgaagtgatgatgcagattgactgtcaggtgatggacaccaggatcctccatatcaaaagttcgtcggttcctccttacctccgagatcagcagaggaatcaaaccaacaccttctttggctcccctcccgcagccacagaggcaacccacgttgtcagcaccatccctgagtcattacaatagcacccgcagctatgtggaaaactgagcgtgggacccccagactgaagagcaggtgagcaaaatgctgcttttccttggtggcaggcagagaactgttcgtactagaattcaaggagaaaagaagaagaaataaaagaagctgctccatttttcatcatctacccatctatttggaaagcactggaattcagatgcaagagaacaatgtttcttcagtggcaaatgtagccctgcatcctccagtgttacctggtgtagatttttttttctgtacctttctaaacctctcttccctctgtgatggttttgtgtttaaacagtcatcttcttttaaataatatccacctctcctttttgccatttcacttattgattcataaagtgaattttatttaaagctaaaaaaaaaaaaaaaaaaa

SEQ ID NO: 1109 - DNA, 617 bp, Homo sapiens
ggggaagaagttggtgtttcgctgggccctggtactgaagacgcggtccgggtcgcccctagctgtttcctactcacccaaagccccgcacccgccttttctctctctcctctggcaggatgaggcgtgcaggcctgggtgaaggagtacctcctggcaactatgggaactatggctatgctaatagtgggtatagtgcctgtgaagaagaaaatgagaggctcactgaaagtctgagaagcaaagtaactgctataaaatctctttccattgaaataggccatgaagttaaaacccagaataaattattagctgaaatggattcacaatttgattccacaactggatttctaggtaaaactatgggcaaactgaagattttatccagagggagccaaacaaagctgctgtgctatatgatgctgttttctttatttgtcttttttatcatttattggattattaaactgaggtgatgcatgtaattgtgaatttggaatttgttccaacttaatggcttgcagtgcagtaccactttgataaaaatcagcatcaaaacattcccagtgttcaaatacgtggcattttccattgaaaattgctgaattttagactta

SEQ ID NO: 1110 - DNA, 34641 bp, Homo sapiens
gtcgaccaggatggagtgcatcggcgcgatctcggctcactgcaaccaccgcctcccaggttcaaacgattctcatgcttcagcctcccgagtagctgggactggaggtgcgcggcaccatgcctggcttatgttctgtattttttgtagagacggggtttcgccatgatgcccaggccggtctcgaactcctggcctcaagcgatccgcccctcacggccttcagagctgctgtaatcacaggcgtgagccaccgcgttcgactcttccaaaaactttttggccagtttatctaagggcatatcctacagactgagtccagtgattgcacagaagtaaacgtcctctgcagctacatacctacaaacctatttctgtaacgtacattccccagcaaggtcccgcgggaaggatccactaccgcgagaggcctcccagccaggaaggggtggggctcaatctgcagtagattcccagaagcctcagtgagtttctgattctctaactgcgcatgcttctgcgcacgcgcaatagacattccaggacttccgggcacttcgtaaggtttaaaaaggatgcttcgcgttttctctctcctttttggagacagattcgcagtggtcgcttcttctccttggtaagtgtgatccttggtaagtgtgatcagatgcttgccaccggagttgtgggtctaatgctatagatcagtagccgagcttccctagaagatcatatagtattttatttatttactttttttttttttttgagacggagtcggtttgtcactcaggctggactgcagtgctcgttgcaacctccgcctgccgggttcaagcgattctcgtgcctcagcctctccagcagctgggattacaggcacgtgccaccacgcccggccaatttttgtattcttagtggagacggggtttcgctatgttggtcaggctggttttgaactcatgatttccggtgatccaccaccctcggccttccaaagtgctgggattacaggcgtgagccaccgcgcctggccggaaatcatgtaatttaaaactatatatgggtgtcttaggcggcatcggtcccaactctaaagtacgcgttagacgggcctgggccagaagtgggccatggagacctcgggacccgcaggctgccgcccgacccagcgagcctctgaaggtgcaccgccacccccactgtttatcttactgcctcatagtaggcacattgtcgttctcaatataattgcacacagttttattctggatcctcatttgcctttaagaattttctcaatttttctttttatttgatcgcaccactgcaacctccgcctgctgggctcaagcaattctcctgccgcagcctcccgagtagctgggactacaggcgtgtaccaccgcgcctggcttatttttgtatttttagtagagacgggatttcaccatgttggccaggctggtctccaacgcctgaccttgtggtccgccacgccaggccgaagattttcataatttggaagcattacgtttcgtaattatgctttctcgtatttttgtgatttgggtcatttttatttttatatttttaggattacaggcgtgagccatcgtgcctggccgatttgggggtaattaacaagtccacgtgtttcatttgaatttaggatagctgggcctaattgttgtctttgcttctgcggtaccttccacatagtactaaccgcctattgtaaagtaattagaatagctgaatatgcatgttaccagtctagaaaccgatttttttttaacaccccactgtggacagggtggaaactcgtttgctttcttgtttaagatctgtagtaacatgaatggatgaaattgtttcctattggattctgtaaatttatgcgttacactgattgtccaacgtggatacacccgggaggtcactctccccgggctctgtccaagtggcgtaggggagcatagggctctgccccatgatgtacaagtccctttccacaacgttggaaataaagctgggcctcgtgtctgcgcctgcatattcctacagcttcccagagtcctgtcgacaattactggggagacaaaccgatgcaggaaacagccttctagagcactgaatctggattgaagtcttttttttttttttttttttggagatggagtcgctctgtttcccaggctggagtgcagtggtgcactccattgcctctgcctcccgggttcaagtgattatgctaagtgattctcctgccttggcctcctgagtagctgggattacaggcccccgccaccacgccaggctaatttttgtatttttagtaaagacagggtttcaccatgttggtcaggctggtctcaaactcctgaccttgtgatccgccagcctctggcctcccaaaatgttgggattacaggcgtgagcaccacacctggctggattgaagtcttaatacatgtttaagaaaaattggctaaaaagtagccaggcatgatgataggtagctggaggaaggagaatcgctggagcccaggagtgacctatactcaaacctatactccagtgccactgtactccaaccccaggcgatagcatgaggcccctcgttgaaaaagtttagggttttgctgtactaatagattaatatcttgttttgcaggatttgttaaggattccaagtaactcttatttggtgagtaaatctgctaattgttttttgcttatcagctctttgtcaatgatttctgtaatggaaataggattgaagagacttttattctagttggtcaggatttacctctgaggcatttaatcattctcagagcaatagccaaatatcgactttgctgcatttttgtaggcatgttgacataacttcaacatatgctctgttctgtaaaaattgctttttttagtcagctcattaaaagtgcaaagtagtaaaagctgccctagtgaactgtaggaagcctaattggctttatctacatgtgtagcctgagctgagaaagatactagcccttgaaaatactgtgggtgattagcaatattggatttgtcggttactccaattcctcactaatgagcattccaacgtggataccctgggaggtcactctccccaggctctgtccaagtggcataggggagcttagggctctgcccatgatgtacagtccctttccacaacgttgaagatgaagctgggcctcgtgtctgcgcctgcatattcctacagcttcccagagtcctgtggataatgataggggagacaaaccatgcaggaaacatatctagtatactagattttaagttgaagtaggatcttcaggagtctaatcattatttcttttcttttaggagagaagacgatctgcacttcgcattttggcattgacatttaattttagggtcctttatatagaagggagagtaggtaaactgatttttttttttaacagggagggtttgacaatctttggcagacttggagcaaaagattgaggtgcatttcatgcctccttttgagagtcttgctctgtcgcccaggctgtagtgcagtggcgcaatcttggctgcaacctcagcctcccaagtagctgggattacaaacataagccaccacgcccagccctcatacctcttttaaaagtcgacctgttttgcagaaagtctgctgtttttgtactaaaggctttggaatttggcatttagctaggaatgcacattctttcacctcattcatactttaagaaccacagaagtgactctgcttggccagaaggcacactgtgttggtggttatattaaaagtccttgagtattttgcttttcatgatcttgctcactgcaacttccgcctcccaggttcaggcgattctcctgcctcagcctcccaagtagctgcgactacaggcgtgtagcaccacacctggctaatttttgtatttttagtagagatgaggtttcaccatattggccaggctgttctcaactcctgacctcgtgatccgcccacctcagcctcctaaagtgctgggattacagctgtgagccaccctgcccggccacttttgtatgatttctaatgtatttgtaatttacctaacaaattgcctaatctgctatgttaatgtatttatgaattaaaataaatacgactgcatgtttgtggttcatttttgtggaggtggctgtggtgacatcagccaagaatctgaatggtactgttgaaggaaactagcatgatagcttcagttctaaaggccctgaaacctagtctcaggtgggtcccccttgggttcactttatattggcagtttattgggaaaatggatattaggtcctgaccaataggaccgtaagtctgggttgagtgcaagatgagttagaccgattctttagcttcctgcagtgtagtggaggaaaaatcgatggtagcaacgggaggttgtatccctagctgatgagttgtatgagcctctactacctggcgcacctccgcctgaagattgccagaattgcttgcctcatgacgtgagtcacaatggaaactttgtcaagccccctgcactggctgccaacataaatgttcagtaccctgaaggatgggactgaagggggatcatctagaaggtaaagttacctactggcataggggaggtgggacagccgttaagccatttggaacttgatggagacaggtttgagggaggtgggtgagattggagtttggtggactgtagagcttgcttgccaaggtgttgaggtcagggttggtttgagaatggaagctagttactagctatgattgtgggggaacacagcttgatttttcttacaagctaagaggagtgaggcagtgtttaagagggcatgttaaatgcagccaggcttggtggctcacacccgtaatcccagcacttaggctaaggcaggcggatcacaacatctagagatcctggccaacgcggtgaaaccctgtctgtactaaaaatacaaaataactgggcatggtggtgtgcacctgtgggaggctgaggcagaattgctggaacccgggagatggaggttgtactgagctgagaccttgccactgcgctccagcctggtgacagagttaagtctcaaaaaaaaggcatcttcctaaagcaattgtatttgtgcttacctgtgccaggcactgttctaggtaagcactaagtgggctttaatacagcatattccaatggggaatcccaggaaccaaaagactaattgtccaagtccacaactagaagtggcacctctgcagaaacaagcatcaaattccctgctcaggaagaagccagatgagtcagccccattcgtctgtatgcccagtcccatccgtgtcctgctgtaactacatagatctcacctgagtaaagtgatttttttctgaaccagtggttttagtatgttttcaatccatattctcaggtgggtttgggtaactgcagtgctgggcaggaaatgaatgaatttctattgacttgcaaggtagaggtgaagcaaagctgtcagtaggtgttcaggtcccactctgctaaacttcagcttgcaatacccctttcttagactttccaaacaggcacttctggccttgttctttgtgtaggcagacagtattggttgcctatcttaggagtactagactgggtttgaatcctgatcccaccacttgctgttcatgagactttgggtgagttactcagcccctctgcctcaatttcatgttcacaaaataagtgataaactacctcatagagttgtaataaggacaaaggagttggtatttgtgaaaagattcttagggtctctagatggagtgcagcagcatgatcacttattaaataacattcttttgtgacttctcaggaaccaaggatacagtatccaattttttgttttttgtttttttttttttttgagagggagtctcgctctgtcgcccaggctggagtgcagtggcacaatctcagctcactgcaagctcagcctccccagcagctgggactacaggtgcacgccgccacacccggctaatttttttgtatttttagtagagaaggggtttcaccatgttagccaggaaggtctccatctcctgacctcgtgatccgcccacctcggcctcccaaagtgctgggtttacaggcgtcagccaccatgcccagcttttttttttttgagatcgaatctcactctgtctccaggagggagtgcaatggagccatcttggcttgctgcaacctccacctcccgggttccagcaattctcccacctcagcctcccaagtagctgggattacaggcgcacgccaccatgcccggctaattttttttgcattttttagtagagacgggtttcaccatgttagccaggctggtctcgaactcctgacctcaagtgatccacctgcctcagcatcccaaagtgttgggattacaggcgtaagccactgcgcctagcctcaagcctgatcctttttttttttttttttttgagatggagtctttgcctcccaggctggagtgcagtggcgtgatctcagctcactgctacctctgcttcctgggttcaagcgattctcctgcctcaacctcccaagtagctgggattacaagcgcctgcaccgcacccggctaatttttgtgttttttttttcagtagagacagggtttcgccatgttggccaggctggtctcaaaactcctgacctcaggtgatccacccgccttggcctcccgaagtgctgggattacaggcatgagccaccacgcccggcagagccttgatctcttaaccactatcctcacctcccctttccctaaggatccacaatggcctcactggctcttgaaggcaggctggcaccttgatcattcttcctggtcattagtattctgatctggttattttccattttatgtccatctaacctacttggaggatcctcaagagactgcatatgtaaactcagtacttattcttgtactgtgcctgccatatagcaagcactggctgatttaatttttctgtgttcttttttattgatttgtttttatctttattattttctttgcttattttggggttagtttgctcatctattcctagtttcttaagctagtagctgagctcattgattggagacctttctttttttctaatgtaggcatttagtgctataaatttcctccagatactgttaacaacacacaaattctggtatgttttgttttcattttaattcatttcaaaatatttttgagttccttttctattctttgatctatgggctacttgaaagtgaattattgttgttgtattagtgttgttcaaatctatccttgctagtttctttttttttggagactgcgttccaaaggctggagtgcagtggcacaatcttggctcactgcacagtccgcctcctgggttcacaccattctcctgcctcagcctccccagcagctgggactacaggtgcctgccaccatgccctgctaattttttgtagagatggggaaatgccatggtctcaatctcctgaccttgtgatccacccgcctcggcctcccaaagtgctgggattacaggtgtgagccaccgcgcccagcctcttttttttttttagacaagagtctcactctgttgccaaagccagagtgcagtggccaaatctcagctcactgcaacttctgcctccggagtagctggaattacagtcacgcaccaccacgcccagctaatttttttgtatttttagtagagatggggtttgcgcggctgaagtgcagtgatgcgatctcagctcactgcaacctctgcctcccaggttcaagcaattttcatgcctcagcctctggagcagctggtactacagcatgcaccaccatgcctggctaatttttttgtattttagtagagatggggtttcaccatgttgcccaggctggtctcaaactcctgagctcaggcagtgccgcctccctgacctcccaaagtgctagaattacaggactgagccaccgtgccctggcccttattttaaaaattttatttctgtaggtaacatgttgggtttttcagtatgacagtctatgtcttttaattggagtgtttaggctatttactttttttttttaagacagggtctcactctgtcacccaggccagagttcagtggcaagattatgactcactgcagccttaaactggaactcctggctcaagccatcctcccagctcggtctcctgagtagtgaagaccacaggcatgtgccactatggctggctaaattttgtattttttgtagagacaaggtctcatgatgttgtcccagctggtcttgacctccagggctcaagcaatcctcccaccttggcctcccaaagtgctaggaatacaggcatgagtcaccatgcccagccatattatacatttttaacttacaatagtccacattcaattgatattaaaccagttcacttgtagtataagaatcttccccagcctggccaatatggtgaaaccctgcctctactaaaaatacaaaaaaaaaaaaattagccaggtgtggtggtgctcgcctgtagtctcagctacttgggaggctgaaacagaagattgcttgaacctggaagcagaggttgcagtgagctgagatcgtgccacgcctaggcaacacgagcaagactccgtctcaaaaaaaaaaaaggcggggcccggtggctcacgcctgttatcccagcattttgggaggccgaggcgggcggatcacgagatcaggagatcaagaccgtcttggctaacacggtgaaaccccatctctactaaaaatacaaaaaattagccgggcgtggtggcgggtgcctgtagtcccagctactagggaggctgaggcaggagaatggcatgaacccaggaggtggagcttgcagtgagccaagatcgcgccactgcactccagcctgggcgacagagcgagactccgtctcaaaaaaaaaacaaaaaaaaaaccttctggcggcctggtgtggtggctcacacttgtaatcccagcactttgggaggctgagactggcggatcacctgaggtcgggagtacaagaccagcctgaccaacatggagaaaccccgtctctactaaaaatacaaaattagccgggcatggtggcacatgcctataatcccagcaactcgggatgctgaggcaggagaattgcttgaacctgggaggcagaggttgcagtgagccgagatcatgccattgcactccagcctgggcaacaagagcaaaactccatctcaaaaaaaaaaaacaatcttccggctgggcacagtggctcacgcctgtaatccatcccagcactttgggaagccaaggcaggcagatcacgaggtcagagcgagactccgtctcgaaaaaataaataaatatttcttccatttctcactatatagtctttgatattgtcatgtgtcttacttttatatatgttataaaacccacagtacattattacagccagaacctccatatcagccagttgcgatggctcactcctgtaattccaacactttgggatgccaaggcaggctgactgctgaggctcagaagttcaagaccagcctggccaacatagtgaaaccctgtctctaccaaaaatacaaaaattagatgggcaattagctggacgtggtggtgcacgcctgtaatcccagctactcgggaggctgaaacaggagaattgcttgaacccaggaggcagagattgcagtgaactgagatcacgccattacactccagcctaggcaacagagtgagactccgtctcaaaaaaaaaaattagctgggcatggtggtgcacatctgtggtcccagctactcgggaggctgaggcagaagttgcagtgagccgagatcctgccactgcactccagcctggatgacagagtgagactcttgagacaaacaactggggctgggcgcagtagttcacacgtgtaatcccagcactttgggaggccgagatgggtggatcacttgaggtcaagagctcaagaccggcctggccaacatggtgaaaccctgtctctattaaaaatacaaaaatgagccgggcatggtggtgcgtgtctgtaatcccagctactctggagactgaggcaggaaaattgcttgaacccaggggcagaggttgcagtgagccgagattgcaccactgcactccagcctgggcaacagaatgagactccatctcaaaataaaataaaaaaatacaaatacaaaactaaaaaaataaaaataaagggccaggtgcagttgctcatgcctgtaatcccagcactttgggaggccaagatgggcaggtcacctaggtcgggagttccagaccagcctggcaaaaatggtgaaacccggtctctactaaaaatacacaaaatggccaggcgcggtggctcacgcctgtaatcccagcactttggtaggctgaggcgggtggatcacctgacgtttaggaattcaagaccagcctggccaaggatggtgaaaccctgtctctactaaaaatacaaaaattagctgggcatggtggcaggcgctgtaatcccaggctactcaggaggctgaagcaggagaattgcttgaaccctggctgcagtgagccgagatcgcaccactgcactccagcctgggcaacagagtgagaccccatctcaaaaaaaaaaaaaaaagagttgaggtctccttccaccacttgtgtgaagaccccagaaaacttgctttacctctttaaacttcagttttcttatcttccaactgccatgaggtttttgtgaggaacaaatgagctgacatggatgtttctgtagttaacaaaataaagggtcttacaaaataggcaataataataataatcacttattattattacatgaagctacatgaatgtgtaagatcttggaggaagacagcagagagagagagagagatcagagatcccagggttaaaagttggagaaatttcacagtacatcatccaaaagaggagtccatgatggaggcagaggtaaacttggagaggtaagaaaccctgaagacaggggagtgctttgtggcaggctctgcatataagaattcagcctggccaacatggcgaaacccagtctctactaaaaatacgaaaattagccaggctttgtggcaggcacctgtaatcccagctatttgggaggctgaggcaggagaatcgcttgaacctgggaggcagaggttgcagtgagccgagatctcaccattgcactccagcccgggtgacaagagcaagactcgatctcaaaaaaaaaaaaagttcagttcagttggtaagactcatcaaaagtgtccatctagactttgggtgccgtagaatgactcagagtctgaatcaacatgaaatcgagaaaacgtcctttgcaagggtttcagggaacacctgaaatcctgaagaactgtttgtatccatcctgaagaatgggtgttaataagagacagccttttcttggtacctgttttccatctctaacccaaccccaactcacacccttctattttatctggtctctctcattcctcttgctcctccccacttggctcccgttttccccaagtccattctctattttgttctataagatctgatcatattaggatgctcttgtagctcataagaagatgactgggtgttcacacgcatatgagatgtgcctccctcaaaccttgttaagacatgggcacatacccatctgatgttaactcacggggaaaaaaatctgatcatgccattcccgtgcccaaattcccatatatccctactgcctcaggatagaggctggaccccttagacacacaagaccctgtatccatgatctgtcactcccacaggcaccctctactcccatctacttggcagtttcccacaacctccctgggttctcgtggttccctgtcattgcaaacgtcgcttctcctaggatgtcctgcccccctagacttaacttggaaagctgttcttaagccccggactgagtcagatgccctctgggtatccctgtcatagcgttgtgtggttgttgatagtctgatttttcaaccttctccatgccctcttgagggtagggaagatgagtatcttttttctccgtacagaccctaccgcacaagattttcctaaacagaccgaactcaaggagtctttctggttgttagtccacgtgtcccgatttggggtttccaaaatacacgcccactggaaccgggccaggggagccagcctggccaagggctcccccagcccggccaagggctcccccagcccgggagcgcgccacatgcagatcctgggatggccgccaggggccgccgggctctttgttttcctttctcacccgggtcggggccagaggcctgcagagcgcatgctctggggcagttcgcggcccggcggggagcgccggagttccttgtggccgacgtgcaccaaggtaggtctcgcctgggacgcgcggagggtccgggcagagggcggtaacgagcgggccacagcggagcacggccggtccacgcggcctaagtcgctgcccgctctcgcccgtgtcgcgcggcgccggccccacgtgaagcccggaggcaggaaggcgcggtgcgggctcgcgattccccggccccgcggggcgctccagcggcggctggcgccgcctcgctcggagctagggccgcgcggccctgcgcgcgcgctctcacggcgccgcgcacgcgccgcagcgacgattcaaactgcgcgagcgcgcgggccgggttgcgcgcggccgcccgggcgggggatgggtctctgccgcgaggaggatggttttgtccggcatgcgcttggagaaggcggtttgcagatcggggagggagcccttgcccgggaagagggtgggtcgtaggagctcgagggtctcccgctgtgcacctttgggagccgtgtgtcttgaactaccgcagcagctcagtctgtcagcagattatttgctggccatttattgcgtccctctcttgcggggctgggggacagtagtgagaagagcaggcccgtgtcattagcgaactatgcccttgaacccaggcgacggacgctactggcaagtcattcatacgtcacatattgacctaacttcgaccacgtgtgacttgtgtgccctagcagaagttgagtgtgtggggtgtttacggggaagccctcagggggatcccccaccctgcccaggaggctcagggatggctttccaggtgaagtgactcttgaatggggttttgaaggaacagagtttttcaggcagtctgagggtagtgggattagggtgatacaggcagagggattgcacgtgcaacggcatgaaggtataggtattgtggtcagggataccacaggtcttgcaggtgactggaggaggagagtaacaagatgatacagcaggggcctcgggtcacgaagcgtcttgtgtgccaagactcaaggaactctgcggggtggaggaggcagggaagatttcccccaagaagggtatcagagtgaaacctggacagatgaattaggagttcacgaggctcctgtttcaaagacatcccaagagcaggaatcctgttctgttcatcgttacaactttctcatcagatgcccttggcaacccacccagtcccccagagcattggtttccttatctgtaaagcaatggtagggggcatgtggtgaggatataatttttttttttttgagacggagtttccactcttattacccaggctggagtgcagtggcgcgatctcagctcactgcaacctccacctcctaggttcaagcaattctgcctcagcctgctgagcagctgagactacaggaacacaccaccaggcccagctaatttttgtatttttttttttttagtagagacggggtttcaccatgttggccaggctggtcttgaactcctgacctcaggtgatccacctgccctcagcctcccaaagtgctggaattacaggtgtgagccaccgcacccggccaattttttttttttttctgatacagaatcttggtctatcgcccaggctgtagtatagtgtcgtgctctcagtcgctgcagcctccacctcccgggttcaagcgattctcctgtctcagcctcccgaatagtaatatcctataattttcataaagcagtgaagttgtgtgtcccttcccccaggaaaaatgaacacataggcccaggcacaggttgtatagaacggggatcccaggtgagaaactcctagtgtgaaatataccacctgtgtgcctggcataacagcagctcaccaaatgtatattgttgacacatgagccctctcctcccttccctcctggggaccttacacacagagatttttcagccttagtctggcaggcaagttcttcctcctggtgtgggggacggagggcacagctgcagtggcctgggagggctctgtctccttttacagaaatcgaggctgtggtgaggtcactggaggtcagggcaggagcaccaggctccgggcagactgtctagactggcgtgcctacccactttcttcaataaataaggaaggtgaggtgggggtagggcagctccagctctggtggagcatggtcatgagactgggatttcattccacctctctgtgacctgggtcacctttccctgagcctcatcttccccttagctgtaaaactgggatgagtctgctcacctcaaagggcagctgtgggcattcaggagtgcctgatggtggaagctgactctgtagccgacttatctgtgactgtctcactcttctcccagagactgtatgctccttgaagatggaagctgtgttgtgtggggcggggtggggaagcatgatgccaaaagccaactccttattcccagcccagatactcactgcctggttaagaaaacagccagagaggccgggctcggtggctcacgactgtaaccccagcaatttgggaggccaaggtgggcagatcacctgaggtcaggagttcaagaccagcctggccgacatggtgaaaccccgtctttactaaaaataccaagcagcttagccaggcgtggtggcctgtcgcctgtagtcccagcactagggaggctgaggcgggagaatcgcttgaacctgggaggcggaggttgcagtagctgagatcgtagtctgactccagcttgggcaacagagtgaggctccatgtcaaaaagaagaaaagaaaagcaaataaaggaaaacacacccagagcagtgagagaagtctgtatacaacgacccatttgtgcagtagaggctgtgcaggcaggtaccgggaacagggctccaccttttagaaggtggtcctctggccgggagcagtggctcacgcctgtaatcccagcactttgggaggccgaggtgggtggatcatgaggtcaggagatcgagaccatcctggctaacacggtgaaaccccgtctctactaaaaatacaaaaaattagctgggtgtggtggcaggcgcctgtagtcccagctactcgggaggctgaggcaggagaatggcgtgaacctgggaggcggagcttgcagtgagccgagatcgcgccattgcctccagactgggcgacagagcgagactccaccttcaaaaaaaaaaaaaaaaaaaaaaaaagaaggtggccctccatcccctgcccttccctgcgattgccagcccagtgcagggcctcaagtcttccattttggagaggaagcctctgggactcaaagacgactcaggtgccgtctccaccgcagcagggagttgtcgccactgtccttccccacatctgtggtggatctgtcaccacccaccccaccttccctcaggctctagctgcctcattgtctcctctctggtctcaccatcctctcctcagctggcttctgctctctgcttcttggacttggccaagtgcataggggatactggggaggcctgcccagactgccttagcccctgcctggaccaaggtctgccttcagaatcagtcagataggcctgggttgcttttctaggctgccctttacttgctctgtgaacttaggccgataaagttatctttctgagcctcagttccttaactgtgaaataggagtgacagtgctgccttcttcagcttcctgtgaggaataaaagggttttgcatatggaagatacagtgagttagccggtgccccagggctcatattttaggaagttgattggtatggtggacaggcatgtaaattaaagtgattgtgatccaaaagtctgtcccagtttctcagagagaatgactagttcaggatggaggagggatcagaggaggtgactttgagacaccagtagatgttcttccagtgggataagggatgggaaggcgttccaggtaaagagatgcaaatagtatggagaggacagttagcattctggcctggtgggtctggcaaggagattgtgtgggaagagaagggaggatgtgatagataggaaatgaagctaaaggttctgtcagtacccgatgttggagacctctaatacccagctaagaaatgtgggctttatcttccaggaaaaggggaccactaaggagtccaagcaggccagcagcttgcttcaggtttgaggtttggaaagatcatgaatgaggccgggcatggtacctcacgcctataatcccagtactttgggaggtcgaggtgggaggatcacttgagcccgggagtttgagaccagcctgggcaacatagtgagaccttgtctctacaagaaaaaaaaaaattacaaattagccaagcgtggtggtacatgcctgtagtcccagctactctggaggctgaggcaggagggtcgcttgagcctaggaggtggaggttgcagtgagctgtgtacgtgctgctgcacctacagcctgggcaacagagtgagaccctgtctcaaaaaaaaataaatatatatatgtatatatatacacacacacatatttattgatcacgaatgacttgagaatgagaggaggggatgagggtggggaccggaagaccagtgaaaagttgctgtctttcctagggaaaggaggaaggaaacacagttccaggcaagctgaaaaactactagggagcatggggaggaaggaagcagaagaaatttctttttttttttttttttttttgagacgagtcttgctctgtcaccaggctggagtgcagtggcgtgatctcgactcactgcaagctctgcctcccgggttcacgccattttcctgcctcagcctcccgagtagctaggactacaagcgcccgccaccacgcctgtctaattttttgtatttttagtagagacggggtttcaccgtggtctcgatctcctgacctcatgatccgcccgcctcggcctcccaaagtgctgggattacaggcgtgagccaccgcgcccggccagaagaaatttctaataacactcaaggacggccagctctgagtctgactaactggttagatcttggcctctctccaattttgagtgagatacttcacctttctgagcctcagttttcttctctgtagagtgggatcattgtggccagcttgtagtgaaacgctccagaatattagccaaacacaactaaggagatgttgactgggtttgttccatccatgataacagattttttggttaatgccccatgacaccaacacttcatatagcccttatgtgtctgactccattccgggctgtgctcatggcagcccagccatcagcaccaactgtgctgacataattgtttcctgctttttctcctgacttcttattgtgagtacttttcatgctaatacagtctccctcccaggcacagcagactgctacagattattctgatgaactgatgagatgtttgccttggcatacagctgtctatctaaaacaagggtgcctctttttttggtggagggacagagtttctctcttgttgcccaggctggagtgcaatggtgcaaactcggcttaccacaacctccacttcctgggttcaagcgattctcctgcctcagcctcccgagtagctgggattacagcacgcgtcaccacgcctggctaattttgtatttttagtagagatggggttcctccacgttggtcaggctggtctcgaactcctgacctcaggtgatccacccgccttggcctcccaatctgctgggattacaggcgtgagccaccgtgcccggccacaaagatgcctcttatatcccacatccctaccccatctaactttgcctgcctgacatcctttctgggatggctcccaagcacttcagattgaatgaaaacacctagcaacatggagcttcacgtctcttctctcctgtttgttcaacagtgttctctatctcactacatggaagtctaccatctacctggtcatttaagcccaagcctgggagtctttgtgtttggccaagctcatagggggatcttgggcaggcctgccaagaatcctctggacttttttaggatgaacaaatcaagccaagtgctgtggcacgtgcccatgatcccaggctcttgggaagctgaggtgggaagatcgcttgagtccatgagttcgaggctgcaataagctaattgcaccactgcactccagcctaggtgacagagtgagaccccctctcttaaaaaaataaaataaaaggccaggcatggtggcttacacctataatcccagcactttgggagtccaaggctagagaatcgcttgagcccaggagttcgggaccagcctgggcaacatggcaagacgttgtttctgcaaaatatacaaaaattagccgggcgtggtggtgcacacctgtagtcccagctatccaggatggctcaagcccgggtggttgaggctgcagtgagccatgaccatgccactgcactcaagtctgggcaggaccctgtctcaaaaataaatacaaaggatgaacaaattatgagagtaaaaaagggttagtctcctttatccttgctacacctcctcacccaaagccaagcagtagtgtagcaggataagccgcagacaaaaccccccagacaccgagttaaagaaggaagggctttattcagctgggagctttggcaagattcacgtctccaaaaactgagctccccgagtgagcagttcctgtcccttttaagggcttacaactctaagggggtctgcatgaagaggtcgtgattgattgagcaagcaggggatatgtgactgggggctgcatgcactggttatcagaacggaacagaacaggacagggattttcacagtgcttttccatacgatgtctggaatctatagataacataaccggttaggtcaggggtcgatctttaaccagacacaggtcgcggcgccaggctgtctgcctgtggatttcatttctgccttttagtttttacttctttggaggcagaaattgggcataagacaatatgaggggtggtctcctcccttagtagtaaagcactataaatatttgtggatttacaaccatttcattcagtcttgatgacagccctgagaagtagtcattgcatccccttttatagatgaggatacagttcagagaggttaaggcaactggccagccacaagctctggaaggtgaacccagttccctctaatcccaaagaatgtgcactttttagtgtgggacaaggggtctcaaaagacaggtgggaggattctcagccctgggagaataaaagttgggtgaagttcagaactgccacctcatcagtcagaactgggccagtgacaacctgcagaagctcagcctgcaaaggcttatcaggattctagacctttggttactttcccatctttagtatttagttctccttccccaggataatcagcagaaaagtgcctggccttgtgtccatataccatggaggggagagctagagaggcgaggttctcgggaaccactagaaggaaggaatgagggggctgctggttaggcccagagctgagaccgagaagggctcttggagttctccttcccttcgtaacattaggtagaggcttagacaacttgattgtttttcatgaccttaaagactgtggctccggccgggcatggtggctcacagctgttgtaatcccagcactttgggaggctgaggcgggtagatcgcttgagcccaggagttctagaccagcctgggcaacttggcaaaaccctgtctctacaaaatatataaaaattagctggacactgtgatgcgcacttgtagtcccagctattctagaggctgaggtgggaggatcacctgagctcaagaggtcaaacctgcaatgagccgtgatttggccactgcacttgagcctgggcaacagagagtgagatgctgtctcaaaaaaacaaacaaacaaacaaacaaaaacaagtacttgatgactccattggggtcaattatgaagagacctcttagtgcaagaccaggaccttctaacagcacaccgaagtctcgagaaattcgcttagttaaatctgacaagggtgcgatgtttatgtggcccaaagcaccattctttcttggtgtatttatccaggcaagacggctaaagtgggaatccactgagactgcaacaacttcaaagttcacatcgtgaaattccttagctttgtcactagaagcaacaatttctgtaggacacacaaaggtgaaatccaaaggatagggctgggcgcggtggctcacacctgtaatcccagcactttgggaggctgaggtgggtggatcacctgagttcaggagttcaagaccagcctcaccaacatgtgaaatcccatctctactaaaaataccaaaaattagccaggcgtcgtggcaggcgcctgtaattccaggtactcaggaggctgaggcaggagaattggcttgaacccaggaggcggaggttgcagtgagccgagactgtgccactgcactccagcctgggtgacacagcaagactccgtctcggaaaaaaaaaaaaaaagaaagaaatccaaaggatagaagaaaagcaccaaatatttcccctcaaagtcatcaaggcttaggtctttgaactctccattgaccacggctgtacccttaaaatagggcgcatcgtgggtgacatcaggtgcatggtatgaggaactggtaccagaattttgcttgaccggaaccagaccacaatatgtttgtcaaacttgttcttccagaagcagcaggcctgagggctgcagtggcagaaatgcccccaaggaatggcactcacatgccgggcaactgatgctcagagtaaccttcccacagcagccgcgatcttcagtgcatgtgtgtttttgtttttttgagacagtgtctgtctctttcgcccaggctaaagtacagtggcacaatctcagctcaatttagcctcagcctcccaggctcacgccatcctcccacctcagcctcctgagtagccaggacttcaggcgtgcaccaccatgcccggctaatttttgtaattttttggatagaaatggggtttcgccatgttgcccacgctggtcttgaactcctgggctcaagcgatcctcctgcctcgacttcccaaagtgctaggattacaggtgtggtggcaccttgtctctaaaaaaaatcaatcaattaaataagaaaagaaaatagctcttctccccctctgattataacaacacattaccaaagttactggtgcttacatggggttgaatggagttatgatggatatttcatttaatgttgttccttcaatgttttaattttttacaacagacttaaaaattttttaaatacatgtggccaggcacgatggctcacgcctgtaatcccgcactttgggaggccaaggtgggtggatcatctgaggtcaggagttcaagaccagcgggaccaacatggagaaaccccatctctactaaaaatacaaaataagccgggcgtggtggcacatgcctgtaatcctagctactccagaggctgaggcaggagaatcacttgaacctgggaggtagaggttgtggtgagccgagattgcgccatggcactccagcctgggcaataagaacaaaactctgcttcaaaaaaaaaaaaaaaaaaaacatgtaatcggctgtacgcagtggcctcacgcctgtaatcccaggacttcgggaggctgaggcaggtggattacttgagattaggagtttgggaccagcctggccaacatggtgaaaccccgtctctactaaaaatacaaaatttgggctgggcacagtggctcacgcctataattccagcactttgggaggccaaggcggggtggatcactgagatcaggagttcgagaccagcctggccaaactggtgaaacctcgtctctactaaaaatacaaaaattagctgggtgtggtggtgggtgcctgtaatcccagctactcgagaggctgaggcaggagaatcacttgaacccaggaggcagaggttgcatgagccgagatcgcaccattgcactctagcctgggtgacagaacgagactccatttcaaaaaaacaaaaacaaaacaaaacttagcagggcatggtgatgcacacctgtaatctcagctactcggaaggctgaggcacaagaattgcttcaacccgggaggtggaggttgcagtgagctgagatcatgcctgtgcgctccagcctggcgacagagtgagactccgtctcaaaaaacagaaaaatacatgtaatgctccttgttaaacatcttagataatataggaagataaaacgaaacaagtaatgattatcttataataccattttccgaggttaccattgttaatatgggatatattttccttccccacatttttctcacatattttttgtgtatgcattttttttccaaaaaaaaaaaaaatggatgataggctgtttttcttcctttttttttttttttttttttggttggggggtggagtttcactactctttctcccaggctggagtgctgagtgcaatggcatgatcttggcctcacctcaacctccacctcctaggttcaagcaattctcctgcctcagcctcccaagtagctgggattacagtcgcacaccaccatgcctggctaatttttgtatttttttttttttttttggtggcgacggggtttcaccatgttggccaggctggtctcgaactcctgacctcaagtgatccacccaccttggcctccgaaagtgccaaagtactgggattacaggcgtgagccaccgcgcccaggcttttttttttttttttttttttgagacagtctggctctgttgcccaggctggagtgcagtggctcgatcttggctcaccacaacctccacctcgcgggttcaagcgattctcctgcctcagcctcctgagtagctgggattacaggtgcccatcactgtgcctggctaatttttgtatttttagtagagacggggttttgccatgttggccaggctggtttggaactcctgatctcaggtaatccgcccgccccggcctcccacagtgttgggattacagatgtgagccaccacacctggccgtctgtttttcattctgcttgttttacttggcaatggggaacatctttctattcaatagattgatctctgaaaacatcacttttgatggcttcatactgttctatcatgaatataccacatatttagttcactactattgaacattcgggttctgtttttgttgtttttaaaatgttatgaaggatacagtagagaatatttgtgtaattaatctgtgggtgcatccattattctgttcttgggatacattttgagaagtggaattgttgggcaattcctcttaacgtatttctagagtgtttgataaatattgtctgattggcccaggaaaatgtttgccatttctcatatgtagtatttgactgactttcaggacaggaagatgtcacccaagcgcatagctaaaagaaggtcccccccagcagatgccatccccaaaagcaagaaggtgaagggtaagttggccttggcctctttgtgggtacaggtggccccttgaaaccctaagaacccggactgggctcctttcttcctgaggcttgaagctgaagggtgtggatgtgcagagaccccacccagctggaaggtttcctgtagctcattgaatcctaccctctgggaatcacaaagtgggcagaaactcctctcaaagcactcaggcagcactggcacaaaaaaaaaaaaaaaaaaactagaccctagggcttcaccccaggcagtgatgcattatggttaggaccactgactttccgacatgggttcaagtccttgctctgccactttctagctgctgggcaagtcacttaatcccgcagtttggattatcaacttcttaaaatggcggcagccagagcagcgtcaccctctctgggctgtgtgaggatgagatgagataatggcctggcagcatttgagggaggtggctgtggtttcctctgtcctgggaccccggaggacagggaggagagaaaagccagcaccaaactgggaggggaagtgttggacccagcgctcagacagtgtctgtgcttttgcagacacgagggccgctgcctgtgccctgccgcggttcctggcgcccgctcctgccaaggtgcctgcgggccgagcctcctgaccagaaaacccgaccaggtggctcgcgccgggccctctgtgctgccagcgcggctcctcagcgtggccacatcctcggggagggctggcgcattggctgcccggggctgcgggttggggcgctttggcccacagagagccccgggcgcgcacctcccgcaaatgcgcctgtccgctcttcctcccgcccctcctgcctctccactgatgtgaggaagagtccgtttctgcagtgatttgcccgggagctgaacttattcactggcggacggcttgggcatggaggagggcttggatggagactggggagtgttctctgacccacgtagtctcccttgcttcgtgcagattctgctattataattagctttctgcggggcaaggcgtcacgcctgtcagaagatcgagacatcctggctaacacggtgaaaccccgtctctactaaaatacaaaaaattagccttgcggtggcgcgcgcctgtagtcccagctactcaggaggctgaggcagaggaatcgcttgaacccgggaggcagaggttgcaattagccaagatccaccactgcactccagactggcgacaaaggaactccgtctcaaaataacaataacaataattagctttcttttcttttttttttttttttttttttgagatcaagtatcactctgtcgcccagactggaggcggcagtggcacgatcttggctcactgccacctccgcctcccaggttcaagtgattctcctgcctcagcctcctgagtagctgagattacaggctactgttggcaaggctggtctcttaactcctgacctcaagtgatccgcccgccttggcctcccacagtgctaggattacaggtgtgagccacgcaccagcccttcttgccctctccaccaagattcatttacacgtatccagtgtctccttgtttcctttctccctttcacgtgaataatgtgctcagttcttaatctccacaaaaatcctgtgagagaggtcatttgtgtccccatttcacagatgacaaaacttagaaagttcatactaacagtctgtggcagagcaggggcttctgcacaggttgtctgatcccagagcctgtgacctctcctcgctgtcgtcatcctctacactcagggtctatcttcttcacccttcagtctcacacaggtcccacagcacagaacccggcttggtgctgacactaggccagggcgacgtgggccagctggggctgggtgagaatgtgatggagaggaagaagccggccctggtatccattccggaggatgttgtgcaggctgaggctgggggcatgcacaccgtgtgtctaagcaaaagtggccaggtaggtgttggggactggcacagggttggacaaggcctggggttgggtggcttggggcagggcttttgaaccacgcatgttcactgtggaaatggagctggctagtcaagtggggagtggcctacatgagaatggactgcgaggccagacgttgcattaatgagggcatccgtgggcacaggtctattccttcggctgcaatgatgagggtgccctgggaagggacacatcagtggagggctcggagatggtccctgggaaagtggagctgcaagagaaggtggtacaggtgtcagcaggagacagtcacacagcagccctcaccgatgatggccgtgtcttcctctggggctccttccgggtaaggctgggtctgaaagtctgcatggtcccgtgaaagacagaattaattgcggggccccaaagataatccgacttccatgcccccatggtacttactggtggggagatgaaagcccacaggtaggagctgaggcccagacccaggactctagcttcctcatgtgggcctgtccagcccactggctgcttccttgaatccgatgtcatcaagtgtctggtcctgggaagtgagtgggtcaaggatgtccctgggttgaggctgatccaggaggcctgctgtcttcacccatctccctgacttctgtctccccctcaccttgccagcactgcctcttccacacttcccagaggcttggatggggcaaggaggtgtggaggcagggattgtcgcatctcagagtttccaaggtacagaggagtgtagttgaaaaaacagattgtgggtttttgttgttgttgttgttgttgtttttgtattgttttgagatggagtttcactcttgttgcccaggctggagtgcaatagcgcaatcttggctcactgcaagctctgcctccctgattcacgccattctcctgcctctgtctcccgagtagctgggactacaggcgcccgctacaacgcccagctaattttttgtattttttggtagagacggcatttcaccgtgttagccggaatggtctcgatctcctgacctcgtgattgcccgccttggcctcccaaagtgctgggattacaggcatgagccaccgcgcccggcctcttttcttttttaattagagacgagatcctgctctgtcacccaggccagagtgcaatggcatcgtcttagctcattacagcctcaacttcctgggctcaggtgatttcttccacctcagcctcgcaagtagctggtactagaggcttgtgccaccacgcccagctaatttttgtattttttgtagggacggggtttcaccgtgttgcccaagctggtcctgagctcaagcgatctgcccacctgggcctaccaaagtgctaggattactggcatgaattaccatgcctggcccagaatagtatattgagtgcccatttacttgccacacagtttcaatgattatcagcttgtggccagacttgtttatctctatttgcatccgctctctgactccttgattattttaatgcaagtcgcagaccataaatgatttcattcataagtatttgagtatgtggcctggctcctgcccacttctccatcccatctggtgccactgacccttctggatttcactggcacggggcaggcaggactggctgataagtgcctgtcctccttctaggacaataacggtgtgattggactgttggagcccatgaagaagagcatggtgcctgtgcaggtgcagctggatgtgcctgtggtaaaggtggcctcaggtgggtctgggggcacttgctcagggcaggagttggaggaccttgttctggggctggcctagccttgggccttacagttgtggcctgcatcccttaccttttcatccttaggaaacgaccacttggtgatgctgacagctgatggtgacctctacaccttgggctgcggggaacagggccagctaggccgtgtgcctgagttatttgccaaccgtggtggccggcaaggcctcggtaagtggccttggtacctccagcagggcaaattggcaggccacccccacagtgaaggccaaacggaggaaggatttgctgtggtcaggcttcgatcagatgggcttgtggtgttggttaggactttggagacagactgctctggtagtttttggccaccctactgtctatgggactctgaacatagtttcttcatcactaagtctacctacctgtaaacctacttcattaggttgctgtgaagttaaatgagttaatgagaagaatatcaggcagatggtaagttccacgtaaatgatacccgtaatgactgtgggaatctgagcaaggcacttgtattctcttgatctcagtttccttttctataaaatagggataagagtccctacttagcctctcaagggcttttataatggaggagaattaaactcggggcagagagaagccatgtgtgtctgtctgtcactgaccgtggctttccctttgcctgcagaacgactcctggtccccaagtgtgtgatgctgaaatccaggggaagccggggccacgtgagattccaggatgccttttgtggtgcctatttcacctttgccatctcccatgagggccacgtgtacggcttcggcctctccaactaccatcagcttggtgagccccgagcccagcttcaggcatgacccagtggcctgcgttcctgtcctggctctgcactcattcattgtgcatcctttgcggggtcgtctaacccctccaagccagttttgtcatctgtaaagtgagaatgtccatatcctgatgggaggtggcctcactgtgggaggagattgagaagggcagctctcagaacaccttcacccctgatggctccggcctttcccccaggaactccgggcacagaatcttgcttcataccccagaacctaacatccttcaagaattccaccaagtcctgggtgggcttctctggtggccagcaccatacagtctgcatggattcggaaggtagggcctttacgtccttctctagtttgggggtggagtgttccctggcctaggcctagccagattcctgagaccatggtccttggagcctgggtctgttccatgggttgtaccatacatgggtccatgagagtcactctcatcctcctagagtcctggtgttcttccaagtgtgagttcaatgggggcccatgtagattctcctaggcctcctccaaaactgggaagagacactgcagatctccttctgatcgctctgggagcagggacacactcccatggacaggtggactcacctagcctgccacccattttgcctgtagcacgccctcttgctattgctcatctctctccctcctcccataggaaaagcatacagcctgggccgggctgagtatgggcggctgggccttggagagggtgctgaggagaagagcatacccaccctcatctccaggctgcctgctgtctcctcggtggcttgtggggcctctgtggggtatgctgtgaccaaggatggtgagtggggctgcctacactctgtctagttgggacctgggggtcatggttcttacccaattccccaataggctgtgatgtccactctcgggggagccggagtacagagagcagtgtttgtgatggcactttgttcctgcttctcagaagctctggcattgatgaatatgaaatgagtacacaaattattttagtaaaggtgacttattatgcagaggagagaaatagcaaagagtgagatatcactgaggcctaaggaggcaatgggactggaacccaagtctccagactcctaacccaggctgctctctcccctcaggtgaccccttcatatatcaccttgtatgttcccgctttccagggacttttacttagaatctaaatcaagaaaaaaaaaggcttagtagtcagagttgtggcaactatagcagaggagggtgtgaacaagtgaccaccaaagcctgagtgggtgagggggatagccatggaggtcctgtagaagcctggagctggcagaggtgcttgacctgaggttatctgggaagacttcctcaggaagtggggcttgcactgtaccttgaaggttccattccttgtgaaaagcaaagaatgccattccaggcagaggaacatcagggcagtctcaaaggtggctggtcctgggaacagagggtggggtaggaccttgaatgccacgcctaggagcagcctttggcagtgtgtagggactgtgctctctggtttacagagttcttttttatccatcatctccttgggttctcccaacttccctgaactcccagagtctggtaccttgccaagctgctattggccaaggccacagtccacgcccatgtcccaggtttctcctgctacagaaaggtgggctggggatcctggagacagctgtacccatttctctctcttgcaggtcgtgttttcgcctggggcatgggcaccaactaccagctgggcacagggcaggatgaggacgcctggagccctgtggagatgatgggcaaacagctggagaaccgtgtggtcttatctgtgtccagcgggggccagcatacagtcttattagtcaaggacaaagaacagagctgatgaagcctctgagggcctggcttctgtcctgcacaacctccctcacagaacagggaagcagtgacagctgcagatggcagcgggcctctccccagccctgagcactgtgtcagttcctgccttttctcatcagcagaacagaatccttttcctcttttccttcctcctctttggaattttcctgggacctacagaataaagggggggatggacagggggttttcaaaaggaacatggctcactcagagctatatggttagacgtttctccccttttccctaccttccatggtcctggttggccctggctttgcctactagaaaaccaaaacttcccccctggggttttgtgcccactctctgagaagttggggctccatcaagccccattctagtcatgtgcccctttcctgtccctaacagtccacaggcaaacaaatggtacagtcataagagccatctgtcacggacccacgcccagaggaacgtgcagaaaaaagcagagctacatggctgtgggcaactataagccaaatatttggctcagaacaggtgtccatgggacaaaaaagaacgatcctccacttgaccaagaaaaaagtgattctcccagaagcacaaagcatactcttgcccctcaggtgttgcttgtgtacatcgtacccatccattcggcttcacctgcagccaacggcctggaatcgcaaagagacaccactctgggcagagcagagcagggtatggggtggggagagggtggagggttttataaacaaacttaacagcaatattgaaaggaggtgggggattgagggagggacagagtgttggagggccagagactagtcctgagatggaaacagcaacttgtacagtggctgagaaaataggatatagttttgatttttttaattgtaaaatattttggagggagaacaaaatcttttaacattttgaataaatttagagttttataaaataggccacttgttttctacacattccctgctttttaagggagcacatattatgtgccaggcactgctgggaaagacagaataaactataaacctggtgttgaggctacaacttaagtgatgtcaagatgtcctgaggtgccaaccagctgtcagtgtgactgtaacaaaggcttcaaatctgtcaagaagtaaggaaaagttttgtttgagttttgtttgggtatttctgttttgggagtcactggattatttttaaatgctgcatagtacaatagaggcagggtggatcttttaataccaaaccaaaaaaaattttttttttttgagacagagtttttctcgtggcccaggctagagtgcaatggcgcaatcttggctcactgtatcctccgcctcccaggttcaagcaattctgcctcagcctcccaagtagctgggattacaggcatgcatcaccatgcctggctaaatttttttgtgtttttagtagagacagggtcttgccccgttggtcaggctggtcccgaacactgaccgcagatgatctgcccgcctcggcctccaaagtgctgggattataggcgtgagaccgcgcctggccgatttttttttttttttttttgagacagtcgctttctttgcccaggctggagtgcaatggtgtgatctcggctcgctgcaacctccacctcccgggttcaagtgattcttctgcttcagcgtctgaagtagctggaattacaggcacacaccaccgagcccagctaatttctaaaattatttatttatttattgaggcggagtctcgctctgttgcccaggctggagtgcagtggcatgatctcggctcactgcaacctccgcctcccaagttcaagcgattctcctgcctcagtctcccgagtagctgggactacaggcgcgtgccaccatgcctggctaatttttttgtatttttagtagagacggggtttcactatgttggccagactggtctccaactcctgacctcctgatctgcccacctcagcctcccaaagtgctgagattacaggcatgagccaccgcacccagcaatttatttatttagagactgagtttcgctcttgttacccaggctggagtgcagtggtgtgatctcagctcactgcaacctccgcttcccaggctcaagtgattctcctgcctcagtaatcccgagtagctgggattacaggcgtgcgccaccacgcctagctaattttttgtatttttagtagagatggggttttactctattggccaggttggtctcaaatgcctgacctcgtgatccacccgcctcagcctcccaaggtgctgggattacaggcgtccaagccacgcctggcctatgtgatcatagtttctattctctgttccaggcaagccccaccaggcctgctgggtgagggtcaggagcacgaggtggctgaggatggcactggcctttgctgctgggtctcctggcctgttcctctcttccgaatgttgtttggatttgctgtctcctctctggttttacattaaatcagtgagactcttggattccctctttgaaatgaaacggtgctgggcttggttccgaccccttcccctggtggcaacctgagcctgtcaccacaagcacaaggtgacagcctgtgatgacaggccatcctcaacccatagcggctctgggccagagccaggactttcctcccaaaagctgaggcagaggcttcaccccctctaggagaggaaggccaacgccaggggctttgagggtgggactgtgctctgttcactgtcatcgctgtggcagcgctaatttttcacatacgaggtgtcgttagtcacacacaaaaaagccaactgatcacagaattctaaacagcacaattctgtctgcagccttgaaaagcctgggacatttagaggtctaggaaaatatccaaagatagcaaaaatatgtgttggttctaattttttgtttgaagacagttgttgctacagaggagatggaaagcagatttagctgtaaaatttatcgatgttccaaagcaaagagaataaattggaaattgcctcatcctacaacaccaactggaagaatccaacctgttattctgttagatgttagagacacttgggaggaggacctgggaggggctgtggctgggggcaccgcccagggccagctggggtggcaggctgtgcgggttgcacacagtagataggccctggcctctgggtccaccctctgctctgagcaccatctggcacagagtgaggggctctacaagcatccagtagaagtattattattattattattccaagatgaggtttcactcttgttgcccacactggagtgcaatggcagatctcagcttactgcaacctctgcctcccgggttcaagtgattctcctgcctcagcctcctgagtagctgggattacaggcatgtgccaccatgctcagctaatttttgtatttttagtagagacgaggtttcaccaagttggataggctggtctcgaactctgacctcaggtgatccgcagcttcggccccccaaagtgcttccccagggatcttctgacctagcaatccagctatgacgggcaggtacctgggccagtgaaagctgagtaacgttagctgcggctcatctgtggaatggagacagacgtggctgtgcaaaggcctcaccaggcagtgcctcccatgctgcctaagaagaggtgtgaggcagagagagcagtgccagggtcctcgagtctggatcc

SEQ ID NO: 1111 - DNA, 2640 bp, Homo sapiens
aaatagacactttggtttgaaagatgtaaacattccaaccttggaaggtagaattcttgttgaattagatgagacatctcaagagcttgttccagaaaagaccaatgttaagccaagggcaatgaaaactattctaggtgatcaacgaaaacagatgctccaaaaatacaaagaagaaaagcaacttcaaaaattgaaagagcagagagagaaagctaaacgaggaatatttaaagtgggtcgttatagacctgatatgccttgttttcttttatcaaaccagaatgctgtgaaagctgagccaaaaaaggctattccatcttctgtacggattacaaggtcaaaggccaaagaccaaatggagcagactaagattgataacgagagtgatgttcgagcaatccgacctggtccaagacaaacttctgaaaagaaagtgtcagacaaagagaaaaaagttgtgcagcctgtaatgcccacgtcgttgagaatgactcgatcagctactcaagcagcaaagcaggttcccagaacagtctcatctaccacagcaagaaagccagtcacaagagctgctaatgaaaacgaaccagaaggaaaggtgccaagtaaaggaagacctgccaaaaatgtagaaacaaaacccgacaagggtatttcttgtaaagtcgatagtgaagaaaatactttgaattcacaaactaatgcaacaagtggaatgaatccagatggagtcttatcaaaaatggaaaacttacctgagataaatactgcaaaaataaaagggaagaattccttcgcacctaaggattttatgtttcagccactggatggtctgaagacctatcaagtaacacctatgactcccagaagtgccaatgcttttttgacacccagttacacctggactcctttaaaaacagaagttgatgagtctcaagcaacaaaagaaattttggcacaaaaatgtaaaacttactctaccaagacaatacagcaagattcaaataaattgccatgtcctttgggtcctctaactgtttggcatgaagaacatgttttaaataaaaatgaagctactactaaaaatttaaatggccttccaataaaagaagtcccatcacttgaaagaaatgaaggtcgaattgctcagccccaccatggtgtgccatatttcagaaatatcctccagtcagaaactgagaaattaacttcacattgcttcgagtgggacaggaaacttgaattggacattccagatgatgctaaagatcttattcgcacagcagttggtcaaacaagactccttatgaaggaaaggtttaaacagtttgaaggactggttgatgattgtgaatataaacgaggtataaaggagactacctgtacagatctggatggattttgggatatggttagttttcagatagaagatgtaatccacaaattcaacaatctgatcaaacttgaggaatctgggtggcaagtcaataataatatgaatcataatatgaacaaaaatgtctttaggaaaaaagttgtctcaggtatagcaagtaaaccaaaacaggatgatgctggaagaattgcagcgagaaatcgcctagctgccataaaaaatgcaatgagagagagaattaggcaggaagaatgtgctgaaacagcagtttctgtgataccaaaggaagttgataaaatagtgttcgatgctggatttttcagagttgaaagtcctgttaaattattctcaggactttctgtctcttctgaaggcccttctcaaagacttggaacacctaagtctgtcaacaaagctgtatctcagagtagaaatgagatgggcattccacaacaaactacatcaccagaaaatgccggtcctcagaatacgaaaagtgaacatgtgaagaagactttgtttttgagtattcctgaaagcaggagcagcatagaagatgctcagtgtcctggattaccagatttaattgaagaaaaccatgttgtaaataagacagacttgaaggtggattgtttatccagtgagagaatgagtttgcctcttcttgctggtggagtagcagatgatattaatactaacaaaaaagaaggaatttcagatgttgtggaaggaatggaactgaattcttcaattacatcacaggatgttttgatgagtagccctgaaaaaaatacagcttcacaaaatagcatcttagaagaaggggaaactaaaatttctcagtcagaactatttgataataaaagtctcactactgaatgccaccttcttgattcaccaggtctaaactgcagtaatccatttactcagctggagaggagacatcaagaacatgccagacacatttcttttggtggtaacctgattactttttcacctctacaaccaggagaattttgaatttaaaaataaatccaaacattttccttcatattatcaatgcttatatattccttagactattgaaattttggagaaaatgtatttgtgttcacttctatagcatataatgttttaatattctgtgttcatcaaagtgtattttagatatactctttctcaagggaagtggggatattttgtacattttcaacacagaataaaaaatgtactgtgccttg

SEQ ID NO: 1112 - DNA, 2621 bp, Homo sapiens
tgtatctgtatcaagatgatctgaagaacagcttctacctttaggaatgtctagtgttccaaaatgactagcatcttccattttgccattatcttcatgttaatacttcagatcagaatacaattatctgaagaaagtgaatttttagttgataggtcaaaaaacggtctcatccacgttcctaaagacctatcccagaaaacaacaatcttaaatatatcgcaaaattatatatctgagctttggacttctgacatcttatcactgtcaaaactgaggattttgataatttctcataatacaatccagtatcttgatatcagtgttttcaaattcaaccaggaattggaatacttggatttgtcccacaacaagttggtgaagatttcttgccaccctactgtgaacctcaagcacttggacctgtcatttaatgcatttgatgccctgcctatatgcaaagagtttggcaatatgtctcaactaaaatttctggggttgagcaccacacacttagaaaaatctagtgtgctgccaattgctcatttgaatatcagcaaggtcttgctggtcttaggagagacttatggggaaaaagaagaccctgagggccttcaagactttaacactgagagtctgcacattgtgttccccacaaacaaagaattccattttattttggatgtgtcagtcaagactgtagcaaatctggaactatctaatatcaaatgtgtgctagaagataacaaatgttcttacttcctaagtattctggcgaaacttcaaacaaatccaaagttatcaaatcttaccttaaacaacattgaaacaacttggaattctttcattaggatcctccagctggtttggcatacaactgtatggtatttctcaatttcaaacgtgaagctacagggtcagctggacttcagagattttgattattctggcacttccttgaaggccttgtctatacaccaagttgtcagcgatgtgttcggttttccgcaaagttatatctatgaaatcttttcgaatatgaacatcaaaaatttcacagtgtctggtacacgcatggtccacatgctttgcccatccaaaattagcccgttcctgcatttggatttttccaataatctcttaacagacacggtttttgaaaattgtgggcaccttactgagttggagacacttattttacaaatgaatcaattaaaagaactttcaaaaatagctgaaatgactacacagatgaagtctctgcaacaattggatattagccagaattctgtaagctatgatgaaaagaaaggagactgttcttggactaaaagtttattaagtttaaatatgtcttcaaatatacttactgacactattttcagatgtttacctcccaggatcaaggtacttgatcttcacagcaataaaataaagagcattcctaaacaagtcgtaaaactggaagctttgcaagaactcaatgttgctttcaattctttaactgaccttcctggatgtggcagctttagcagcctttctgtattgatcattgatcacaattcagtttcccacccatcggctgatttcttccagagctgccagaagatgaggtcaataaaagcaggggacaatccattccaatgtacctgtgagctaggagaatttgtcaaaaatatagaccaagtatcaagtgaagtgttagagggctggcctgattcttataagtgtgactacccggaaagttatagaggaaccctactaaaggactttcacatgtctgaattatcctgcaacataactctgctgatcgtcaccatcgttgccaccatgctggtgttggctgtgactgtgacctccctctgcagctacttggatctgccctggtatctcaggatggtgtgccagtggacccagacccggcgcagggccaggaacatacccttagaagaactccaaagaaatctccagtttcatgcatttatttcatatagtgggcacgattctttctgggtgaagaatgaattattgccaaacctagagaaagaaggtatgcagatttgccttcatgagagaaactttgttcctggcaagagcattgtggaaaatatcatcacctgcattgagaagagttacaagtccatctttgttttgtctcccaactttgtccagagtgaatggtgccattatgaactctactttgcccatcacaatctctttcatgaaggatctaatagcttaatcctgatcttgctggaacccattccgcagtactccattcctagcagttatcacaagctcaaaagtctcatggccaggaggacttatttggaatggcccaaggaaaagagcaaacgtggccttttttgggctaacttaagggcagccattaatattaagctgacagagcaagcaaagaaatagattacacatcaagtgaaaaatattcctcctgttgatattgctgcttttggaagttccaacaatgactttattttgcatcagcatagatgtaaacacaattgtgagtgtatgatgtaggtaaaaatatataccttcgggtcgcagttcaccatttatatgtggtattaaaaattaatgaaatgatataactttgattt

SEQ ID NO: 1113 - DNA, 836 bp, Homo sapiens
gtgaaacaccctcggctgggaagtcagttcgttctctcctctcctctcttcttgtttgaacatggtgcggactaaagcagacagtgttccaggcacttacagaaaagtggtggctgctcgagcccccagaaaggtgcttggttcttccacctctgccactaattcgacatcagtttcatcgaggaaagctgaaaataaatatgcaggagggaaccccgtttgcgtgcgcccaactcccaagtggcaaaaaggaattggagaattctttaggttgtcccctaaagattctgaaaaagagaatcagattcctgaagaggcaggaagcagtggcttaggaaaagcaaagagaaaagcatgtcctttgcaacctgatcacacaaatgatgaaaaagaatagaactttctcattcatctttgaataacgtctccttgtttaccctggtattctagaatgtaaatttacataaatgtgtttgttccaattagctttgttgaacaggcatttaattaaaaaatttaggtttaaatttagatgttcaaaagtagttgtgaaatttgagaatttgtaagactaattatggtaacttagcttagtattcaatataatgcattgtttggtttcttttaccaaattaagtgtctagttcttgctaaaatcaagtcattgcattgtgttctaattacaagtatgttgtatttgagatttgcttagattgttgtactgctgccatttttattggtgtttgattattggaatggtgccatattgtcactccttctacttgctttaaaaagcagagttagatttttgcacattaaaaaattcagtattaatt

SEQ ID NO: 1114 - DNA, 1322 bp, Homo sapiens
ggcggcctgcattgcagcggggcactgggctgcaatgggcctaggccggagtttccaagccgccaggactctgctccccccgccggcctctatcgcctgcagggtccacgcggggcctgtccggcagcagagcactgggccttccgagcccggtgcgttccaaccgccgccgaaaccggtcatcgtggacaagcaccgccccgtggaaccggaacgcaggttcttgagtcctgaattcattcctcgaaggggaagaacagatcctctgaaatttcaaatagaaagaaaagatatgttagaaaggagaaaagtactccacattccagagttctatgttggaagtattcttcgtgttactacagctgacccatatgccagtggaaaaatcagccagtttctggggatttgcattcagagatcaggaagaggacttggagctactttcatccttaggaatgttatcgaaggacaaggtgtcgagatttgctttgaactttataatcctcgggtccaggagattcaggtggtcaaattagagaaacggctggatgatagcttgctatacttacgagatgcccttcctgaatatagcacttttgatgtgaatatgaagccagtagtacaagagcctaaccaaaaagttcctgttaatgagctgaaagtaaaaatgaagcctaagccctggtctaaacgctgggaacgtccaaattttaatattaaaggaatcagatttgatctttgtttaactgaacagcaaatgaaagaagctcagaagtggaatcagccatggcttgaatttgatatgatgagggaatatgatacttcaaaaattgaagctgcaatatggaaggaaattgaagcgtcgaaaaggtcttgattctgagaatgaatttggttagttgcagaagatacattggctctaagaggatatattttgagaccaatttaatttcatttataagaacatagtaattaagtgaactaagcattcattgttttattaatactttttttctaaaataaaacttgtacaccagtttattactctaaaaagagaattacacatgccaaatggaccaatgtccatttgcttattggaggcaaagctacaatagaagtcagagcatcaccagaatggtctttaatgagcatggaacctgagcaaagggaataggtgggatgaattttttttttaattgtgaaacaattcataagcacaatatgatttacagaataataaacattcatgtacccactatcaggttaagaaatagaacatttattaatatgtaggaatgttaagaaataaaacatttaataag

SEQ ID NO: 1115 - DNA, 6586 bp, Homo sapiens
ctggggagccggcgctggaggtggtgagtggcgtggggactgtgtcgagggggtccccaaggtgccggaccctgcggaggggcgaagtttcggcactggggagggcgtgcggacgctttccctacaggcgaccactgctctgcgggcgggtggtcttagctccagtcccccattcagttcctcagcattccaggtcggcggcgaaggggtccccgaacgaagggcgcaaggcagcgtctctgctgggaccgggaagccggacttcagggcctctcggcccgtgggcttctccccgagtctccccgagtcggttggcattaagagtttagcagatactttcagaaatggatacataagaaatggctggaaatcaaatgaatgtccaaagaagagcttagggtcttagtaacattcttttttaaaataactgtctgccaaaatgtcattacacagtactcataatagaaataacagcggtgatattcttgatattccttcttcccaaaatagttcatcactgaatgccctcacccacagtagccgacttaagctgcatttgaagtcggatatgtcagaatgtgaaaatgatgatccattattgagatctgcaggtaaagtcagagacataaatagaacttatgttatttctgccagtagaaaaacagcagacatgccccttacccctaatcctgtaggtagattggcacttcagaggagaactacaaggaacaaagaatcatctttgcttgttagtgagttggaagacacaactgaaaaaacagcagaaacacgtcttacattacaacgtcgtgctaaaacagattctgcagaaaagtggaaaacagctgaaatagattctgtcaaaatgacactgaatgtgggaggtgaaacagaaaataatggtgtttctaaggaaagtagaacaaatgtaaggattgtaaataatgctaaaaactcttttgttgcctcttctgtacctttagatgaagatccacaggtcattgaaatgatggctgataagaaatacaaagaaacattttctgcccccagtagagcaaatgaaaatgttgcacttaagtactcaagtaatagaccacccattgcttccctgagtcagactgaagttgttagatcaggacacttgacaacgaaacctactcagagcaagttggatatcaaagtgttgggaacaggaaacttgtatcatagaagtattgggaaggaaattgcaaaaacttcaaataaatttgggagcttagaaaaaagaacacctacaaaatgtacaacagaacacaaactgacaacaaagtgcagcctgcctcagcttaagagcccagctccatcaatactgaagaatagaatgtctaaccttcaagttaaacaaagaccaaaaagttcctttcttgcaaataaacaggaaagatccgcagaaaatacaattcttcccgaagaagaaactgtagttcagaacacctctgcaggaaaagaccccttaaaagtagagaatagtcaagtgacagtggcagtacgcgtaagacctttcaccaagagagagaagattgaaaaagcatcccaggtagtcttcatgagtgggaaagaaataactgtggaacaccctgacacgaaacaagtttataattttatttatgatgtttcattctggtcttttgatgaatgtcatcctcactacgctagccagacaactgtctatgagaagctagcagcaccactcctagaaagagccttcgaaggcttcaatacctgtctttttgcttatggtcagactggctctggaaaatcatatacgatgatgggatttagtgaagaaccaggaataattccaagattttgtgaagatcttttttctcaagtagccagaaaacaaacccaagaggtcagctatcacattgaaatgagcttctttgaagtatataatgaaaaaattcacgaccttctggtttgtaaagatgaaaatgggcagagaaagcaaccactgagagtgagggaacatcctgtttatggaccatatgttgaagcactgtcaatgaacattgtcagttcttacgctgatatccagagttggctagaattgggaaataaacaaagagctactgctgctactggtatgaatgataaaagttcccgatctcattcagttttcaccctggtgatgacccagaccaagacagaatttgtggaaggggaagaacacgatcacagaataacaagtcgaattaacctaatagatctggcaggcagtgagcgctgctctacggctcacactaatggagatcgactaaaggaaggtgtgagtattaataagtccttgctaactttgggaaaagttatatctgcactttcggaacaagcaaaccaaaggagtgtttttattccttatcgtgaatctgttcttacatggctgttaaaagaaagtctgggtggaaattcaaaaactgcaatgattgctacgattagtcccgctgccagcaacatagaagaaacattaagcacacttagatatgctaaccaagcccgtttaatagtcaacattgctaaagtaaatgaagatatgaacgctaagttaattagagaattgaaggcagaaattgcaaagctaaaagctgctcagagaaacagtcggaatattgaccctgaacgatacaggctctgtcggcaagaaataacatccttaagaatgaaactgcatcaacaggagagagacatggcagaaatgcaaagagtgtggaaagaaaagtttgaacaagctgaaaaaagaaaacttcaagaaacaaaagagttacagaaagcaggaattatgtttcaaatggacaatcatttaccaaaccttgttaatctgaatgaagatccacaactatctgagatgctgctatatatgataaaagaaggaacaactacagttggaaagtataaaccaaactcaagccatgatattcagttatctggggtgctgattgctgatgatcattgtactatcaaaaattttggtgggacagtgagtattatcccagttggggaagcaaagacatatgtaaatggaaaacatattttggaaatcacagtattacgtcatggtgatcgagtgattcttggtggagatcattattttagatttaatcatccagtagaagtccagaaaggaaaaaggccatctggaagagatactcctataagtgagggtccaaaagactttgaatttgcaaaaaatgagttgctcatggcacagagatcacaacttgaagcagaaataaaagaggctcagttgaaggcaaaggaagaaatgatgcaaggaatccagattgcaaaagaaatggctcagcaagagctttcttctcaaaaagctgcatatgaaagcaaaataaaagcactggaagcagaactgagagaagagtctcaaaggaaaaaaatgcaggaaataaataaccagaaggctaatcacaaaattgaggaattagaaaaggcaaagcagcatcttgaacaggaaatatatgtcaacaaaaagcgattagaaatggagacattggctacaaaacaggctttagaagaccatagcatccgccatgcaagaattctggaagctttagaaactgaaaagcaaaaaattgctaaagaagtacaaattctacagcagaatcggaataatagggataaaacttttacagtgcagacaacttggagctctatgaaactctcaatgatgattcaggaagccaatgctatcagcagcaaattgaaaacatactatgtttttggcagacatgatatatcagataaaagtagttctgacacttctattcgggttcgtaacctgaaactaggaatctcaacattctggagtctggaaaagtttgaatctaaacttgcagcaatgaaagaactttatgagagtaatggtagtaacaggggtgaagatgccttttgtgatcctgaagatgaatgggaacccgacattacagatgcaccagtttcttcactttctagaaggaggagtaggagtttgatgaagaacagaagaatttctggttgtttacatgacatacaagtccatccaattaagaatttgcattcttcacattcatcaggtttaatggacaaatcaagcactatttactcaaattcagcagagtcctttcttcctggaatttgcaaagaattgattggttcttcgttagatttttttggacagagttatgatgaagaaagaactatagcagacagcctaattaatagttttcttaaaatttataatgggctatttgccatttccaaggctcatgaagaacaagatgaagaaagtcaagataacttgttttcttctgatcgagcaatccagtcacttactattcagactgcatgtgcttttgagcagctagtagtgctaatgaaacactggctgagtgatttactgccttgtaccaacatagcaagacttgaggatgagttgagacaagaagttaaaaaactgggaggctacttacagttatttttgcagggatgctgtttggatatttcatcaatgataaaagaggctcaaaagaatgcaatccaaattgtacaacaagctgtaaagtatgtggggcagttagcagttctgaaagggagcaagctacattttctagaaaacggtaacaataaagctgccagtgtccaggaggaattcatggatgctgtttgtgatggtgtaggcttaggaatgaagattttattagattctggactggaaaaagcaaaagaacttcagcatgaactctttaggcagtgtacaaaaaatgaggttaccaaagaaatgaaaactaatgccatgggattgattagatctcttgaaaacatctttgctgaatcgaaaattaaaagtttcagaaggcaagtacaagaagaaaactttgaataccaagatttcaagaggatggttaatcgtgctccagaattcttaaagttaaaacattgcttagagaaagctattgaaattattatttctgcactgaaaggatgccatagtgatataaatcttctccagacttgtgttgaaagtattcgcaacttggccagtgatttttacagtgacttcagtgtgccttctacttctgttggcagctatgagagtagagtaactcacattgtccaccaggaactagaatctctagctaagtctctcctcttttgttttgaatctgaagaaagccctgatttgttgaaaccctgggaaacttataatcaaaataccaaagaagaacaccaacaatctaaatcaagcgggattgacggcagtaagaataaaggtgtaccaaagcgtgtctatgagctccatggctcatccccagcagtgagctcagaggaatgcacacccagtaggattcagtgggtgtgaatactgatgtgtaggcacttttatgaccacccatgaaagaaaaagaacacttgctcggtaattttctttatgcaggagagtttaagagaaatcagcacagatatttcaaaaaagtccatgtctttttatctttaaaatatctatttatcaaaggccagacacagtggctcacgcctgtaatcccagcactttgggaggcgggcagatcacaaggtcaggagtttgagaccggcctggccaacatggtgaaaccccgtctctactaaaaatacaaaaatttgctgggcatggtggcgcgtgcctgtaatcccagctactaggggggctgaggcaggaggatcgcttgaacctgagaggcagaggttgcagtgagccaagatcatgccactttactccagtctgagcaacagaacgagacttagtcaaaataaataaataaataagtaaataaataaataaataaaatatcttttatctttaaagtgtttaacattggtatactgtctgtagttggttcattagtcgtttataaagggttattttctcatgagtggaaacctgaacaatcagttacctttgtgcctatgccttctctctcctcagacagctgggatgtttatggtgaaatggcctgtacaagtttaactaagacaacttaacttgcattgttaatcaaaaattcttttctcaaagggttaactggttgccattttgaatagtatgttcaagggtgtagcttcctgtttctttccaaattataagtagctacctaaatatagtataattatatattaataatatggcttgctggcacagtagtttaccctgttatctgtgtttcataatgggggctgtatgaatattatttaaaactaataaaatgttgccagaattatactaaactgttggatgagattaggagatcagaggctggaccttctcttgataatgcttgttttgttaaaggtataatgaaataatttgtatatgatttgatgaagattaaagacccttattttccacagctttaaaaaaaaacctttatttatgatcaagtaataaagataatattctacttgtgggatcttacattatggaaatagtttgacgtttttgacctcaagagtatgtataatttgaagagatactttgtaactatgcttgggtgatattgagcagttcctaaagaataattcattt

SEQ ID NO: 1116 - DNA, 2726 bp, Homo sapiens
caggagacgccaaggaaagatgggacctcccggcccagcactgccagccacaatgaataactcttcttcagagacgcgaggacacccccacagtgcctcctctccttcagagcgtgtgttcccgatgcccctgcccaggaaggcgcctctcaatattcctggcaccccagtcctcgaagactttcctcagaatgacgatgagaaggagcggctgcagcggaggcgctcgagggtctttgatctgcagttcagcactgactcacctcgcttattggcctccccctccagcaggagtattgacatttcagctactatccccaagtttacaaacacgcagattacggaacattactccacctgtatcaaactgtccactgaaaataaaatcactaccaagaatgcttttggtttgcacttgattgattttatgtcagagattcttaaacagaaagacaccgaaccaaccaactttaaagtggctgcgggtactctggatgccagcaccaagatctatgctgtgcgcgtggatgccgtccatgccgatgtatacagagtccttggggggctgggcaaagatgcaccgtctttggaagaagtagaaggccatgttgctgatggaagtgctactgaaatgggaacaaccaaaaaggctgtaaagccaaagaagaagcacttacacagaactattgagcagaacataaacaacctcaatgtctccgaagcagatcggaagtgtgagattgatcccatgtttcagaagacagcagcctcatttgatgagtgcagcacagcaggggtgtttctgtccactctccactgccaggactacagaagtgaactgctgtttccctctgatgtccagactctctccacgggagaacctctcgagttgccagagttaggttgtgtagaaatgacagatttaaaagcgcccttgcagcagtgtgcagaagatcgccagatctgcccttccctggccgggttccagtttacacagtgggacagtgaaacacataatgagtctgtgtcggccctggtagacaagtttaagaagaatgaccaggtatttgacatcaatgctgaagttgacgagagtgactgtggagacttccccgatgggtccctgggggatgactttgatgccaacgatgaacctgaccacaccgcagttggggatcatgaagagttcaggagctggaaggagccctgccaggttcagagctgccaggaagaaatgatttcccttggggatggagacatcaggaccatgtgcccccttctgtctatgaaacctggagaatattcttatttcagtcctcggaccatgtcgatgtgggctggcccggatcactggcgctttaggcctcgacgcaaacaagatgctccttcccaatcagaaaacaaaaagaagagtacaaaaaaagattttgaaattgactttgaagatgatattgactttgatgtatattttagaaaaacaaaggctgctactattctgaccaagtccactttggagaaccagaattggagagctaccacccttcctacagatttcaactacaatgttgacactctggtccagcttcacctcaaaccaggcaccaggttacttaagatggcccagggccatagggtagagactgagcattatgaagaaattgaagactatgattacaacaaccctaacgacacctccaacttttgccctggattacaggctgctgacagtgatgatgaagatttggatgacttatttgtgggacctgttgggaactctgacctctcaccttatccttgccatccacctaagacagcacaacagaatggtgacactccagaagcccaaggattagacatcacaacatatggggagtcaaacttggtagctgagcctcagaaggtaaataaaattgaaattcactatgccaagactgccaaaaagatggacatgaagaaactgaagcagagcatgtggagtctgctgacagcgctctccggaaaggaggcagatgcagaggcaaaccacagggaagctggaaaagaagcggccctggcagaagtggctgacgagaagatgcttagcgggctcacgaaggacctgcagaggagcctgccccctgtcatggctcagaacctctccatacctctggcttttgcctgtctcctacatttagccaatgaaaagaatctaaaactggaaggaacagaggacctctctgatgttcttgtgaggcaaggagattgagttcactatggagaagtcagcagcaggaggcccatcccttactcagttgccgggacatccccagtctcgggggaagaagatgccatgggcttatacccaggctgtagccaactaccaacgtgcctgtttgtttgttgctctttccttctctccatcatagtctgggtgccagcgccctgaagctccgtgctcaactgattaaactttactgccctatggtgaccatctaggagaggggagggcagagggggtgagggtactattctggattgagaaaacctatatccattctttatatcaatgtatagttttagtctcctaaattgatctgttattttccaaactattctcttgtagaaaattttccagtgggcacttaatggtgcccttgaagaacttcctaatccatgtacataaaatacatcatatgtacacttataaatgtatatagaatgctcaaaaataaaattcttaataatag

SEQ ID NO: 1117 - DNA, 2108 bp, Homo sapiens; identical to SEQ ID NO: 686

SEQ ID NO: 1118 - DNA, 7883 bp, Homo sapiens
ttcaagtatggcagacaaaggatgttctgcgtggggaaatgtggtgacacccatttcacaaggacagctcacatagattgagtgctcaggaaggaccagcaccatacccagtgcctgatgtgtatcatctcaattagtccttgcctcagatgcaaaaggaaaccatcgccatcatcatcaccaccatcatcatcttcctcctgtgcagatggaaaggctgaggcatagagaggtgacggagtctgcccaggactgcaagcctgctggtggcagagccaggttccaatggaatgaaggctgtcatcctcagatggcagggtaggcaggtggctagagctcacttgggagaaggggaaaggacactgactttggctagggatggagcagagcttgggctggctttccatgcacgggcagggggcgtggctcatggctacgctccagccccgggtgtggacatttaatcttccaggtctaccctaggctatgggtctggacagcactgtgatggaaagaagacactctatgtcctgcattctgtgaccaatgatgtgactgtgggaatggcgctggcatctggctgccactctgggacgggtggccagctgccatcaggccccacccaggatgggaccaccatgcgacttcttccctcgctcctcctggtcatgtccagagccccaggaggaccagcaaagcctctcgagccgatggcagctcacgttctgccttgtcagctactcctctcctgggcaatattggctgcttgctgtggctctccccggggtatgtgactgcctctgtgctgggcacctggcctgggctttccttctgggcctgggcagctgggctcagcttggacccaggcagcagccacagaggggcccatggaggtgacagagttgcttctatgatggtgaacgggcagctgtgacacggaggaggcgaccactcctgagtttccaagtgctgcggtcagggccggggccagcaaagtccctcccatattcaaagagcgggtttgggtttgtcccaggaggacatagtcaggagcccatgctgggacatgcctcctccaaagttcagcctggatccccagcctctgccaacggccccgctccttagctaacccagcttgctcctgggttccacggcggagtcagatgtttctgggcagtttcacctttgtgccttaaatgcatgttgaggactttaaggaattgtggagaaatagggctgtggcaaaggcaagtgacaactgggaacaatgatcccgcagaggctgctgaggcctgggccccaggggcgtgggttcatccttctgcctgggctttggtgggaggggcagactctgtggtctgagacacaaaaaaacccaaaacatatgtgtgtacagacacacagcagagccacacacacacttgtgcccatgcacacactcacaggaggcccgtggactccgcacagggaagaaactcctccggtcgacagtggacggcgctgcagcagggactcacccccaagccctgcctgcctcccattgcccacctggccctggcttgatgggcttatctcatgctgtggccggggacctcttgcttcctgcaaccccttgctggactggggcctgggcctctcctgggctgtgcctagggtttgtaacccagggcctgtgccggcgtgcacagagcatctctccctgggaggctcagggctgcctcctcgagctctgtgggcctgcactggccggtgagcttgtggtgtgggttttcaggctgtatccttctacctcctgagcccaggggtcccaggcgccctgcagctgtctcctcggccatcctgtggggccccgaggccttgccctcacttcagtgcctgggtgctcaggctttgcccaggtgccaggagaaggtgtgagcatgagcctattggacacacctggcgacgtataccaggtgtcccacccctgccaccatggggcctcccgatacggcaaccaccacggacctgtggggaccaatgaggaaagagagaggcaggtctgggccaggctcacagggactccggcatagcagaccctgccccagcaggcccccttgtccttcctgggtcctggtccttcatgaggaactagcccatccctggtggggctcccaccccgcttctcagtgggctctatgcttgcctcgtcggagtcacccctcaggcagtcctgggatcctctcctttagacccactgtgccttcccggcctcccgggcttctgctgggggcagaagaaatgcctccccaggtctgtctctggaggctctgagggagatgggcttgggggctgtaggaggaggcagggattccagggtgtcaggaaggcaggggtgccaggtcccacctagtgaagtaataaaccgtgggtggtgatagtgacccagtgccctcactgcccagccccgcctgtcctcagccagcactgcagggatcccaggcccagactctggaggccttcactgatcccagccaccccagaaaagctgcagcctgcaggcaccagccgggccatatgcccagtgccagctagggcccaccgcccatcctgcacacggggccgctgggcaggtgcccctcacacccccaggatgtcagtgctcacctcgagcaaagcgccccagctcggccttgggaggtggtcatgtccagggggatgatggagagctgtccaaccaagagagcgggagggagggaaggagggagggagagagatagagagagagagagagagagaggaagtgtgggccctaaggctgccttagtggaggtgcgcgtggcctgcacctcaccaagcctagccactctcgcggctctgagtggctcacaggcttgtgagggccccgtcgctgcctgctgggtccccaccagggctccctctaggaatgcgccatggctgctatgacaatttgcacagcccagtggcttaaacaccatttataccacaggtccagatgaatcctgcagggccagggtctgggggtgctggaggccatgctccctccaggcttgcggggagaacttccctgcctcctccagtctctccatccctgagctctcggctcctcctccgtcttcagggccagggcgtagcgtctgctctctcggcctctgcctccgcttcccacctcacctggcttctgtctatgtcagtctccctctgccaacctcctagaaggacacttgtgattacattagggctcacccctttaatccaggggagcctctccacttcatgattttcagctaacttgcttctgcacagaccccctttccctataagggcacacattcactggtcccggggctaaggaccttgctccaagtccctccacccatgatgctgtgccttccagaaacctgtcctctgcagctcggtcttgaccccaagcctgctggtgacctgaacttcacagggttatccccttggactgtgtgcagcacgatgcaatttctgggcctgaatgtcatgctccctggggcaggaccttgagcctgcagcacacactaggccacctgcagtctcacaggccatgccctgggtagacagggaggtgctcaaccccagctcgggtcctctagtctgcctggctaccatgcttctcactctcctgcatctgcagaccctgcgttgccatgtgaggcaggggtggggtggggctgagggcgtggctttggtccctggctgtccggatgaagtaccagagtgacgccacagcccatcccggtgacatgctcacccccaacccccgtgtccgggaccccggtcttgtgtggtccctgatgtggagtcctcagtccttaagatacatccagaaagtcctggccatgaattggaggtgcagagtcctgcagagcctctgggctgggctggtgcccccaggagatggagggcctggtggatgccctcctccctcagagctggggcagctgcctcccaggggtgggactctgggctcagagagaggcccttgagctgcagctcagggggatgcgaggcttcgtggactgtgtcctggtccatgtggtgcacgtgtctccacctccaaggagaggctcctcagtgtgcacctcccccacatccgtcctctctgccggccccgggcgtctgagcagtcattccatgccagcacctctgcagcctgctgggcctcaggttctctgtgagggacctccccggccttcggcggaggtggagtaagctccgtcaaggcaggtggcttcgtcccttcctgtgagtgacaccagtgatgaaatggacccctccacacaggcatcctcagggcacagggccctgggggcaccttcctcctttcgtatttgttgagaaaaaaagtggcattgcgctcacaccaggatgctggagcagagctgacatgctcgggaaagggcagaggtcactgggggtgggaaggtcatccagtccagactcagcacctcgtgggctggtaaactgaggctcaaagtgctggtgccaggcctgaggcctcgcggtgacccctctctctggttcccagcacctgcctgagacctgccccaggcacccataacctggaattccctgtttccttgtccagggcctgaggaaatggctccccaggtctgtctctggatgctctgaggcagatgggcttgggggctctaggaagaggcagggactccagggtgtcaggaaggcaggggtgccgggtcccacccagtggagtaacaaactgtgggtggcgtttgggcctccccgccttccccactgggtgtgctggtgctggcgctgctgggtcagggctgcccgtgaccccagacaccactgtccatcctgtgaggctcccgtctgggcatgtcctgggtggattcctcctttctgttaagtagctacatgaggcaggggctcctggatccaaagcaaatgacaggaattccagagccaggtgcatccactcagggcagccagtgttggtggagctgcctctagcacatggaggagagtgaaagtcagcctgcccctctcacgagaaaagaacctggggatacctctcagcctccagcgttgcaagtgcaaggccagtggagttaatctgcaacgtgcacgagggcgtgtgtcagtggctgtgtgcaggagtgtgagtgagcaagagcaagagcgcatggctcctgctgtacctcaaggtgtgggctcctggtggctgctcagtgttcccaggggtgagaggcctcatgtatcctaggctgcctgagatttctgtgtgctgatcgcatcctcagtttcttgtccaccgcttcactggcaagagtcccaggctccaaggacaccctccctgcacatgattgggtgttaatggtggcctgggttgtgtcttcccctggggatgagggttgggtgtccatggtgccctgggctgtgtcctcccctagggatgagggtcgggcctccacgatgccctgggctgtgtgctcttatgggaatgagggttgggtgtccaagatgccctgggctgtgtccttccctggggatgagggttggatgtccaagatgccctgggctgtgtactcccctaggaatgagggctgggtgtccaagataccctgggctgtgtcctcccctggggatgagggttgggtgtccatggtgccctgggctgtgtcctcccctggggatgacggttgggtgtccatggtgccctgggctgtgtttccttggggatgagggttgggtgctatggcatcctgggcaggtgcttcctttctgcacaagggttgggtgaccatgatgtcctggcaatggcttccctgggttgcctcttttctgccatgtgggaagagcaggggaggtttagttggtctcagcacatcattctctcaggataagtagaagagtgtctgagctgtgaggccagtgctccagctttggaattgtcttccccaccctcacctccatcccatcaaagcccgacatgtcgtgtggcagcagcgaggtgggtgttggctgttctcttgggctgggggttagtcgtggacggggaaaggagagatgctggtcaaagggcatgaagtttctgctgatgggaggagtcagttcttttgatctgttgcacagcatggtgactatagttaacaataatgactatttcaaaattgctaaaagatgagattttaaatgttctcaccacaaaatgataagtgtgtgaggtgatggatatgccacttaccttgttttaatcatcccacaatatagacaggcattgtcactttgcattgtaccccaggaatcttcacatttgcttttttgtcaattaaaaatagagacacaaaaggagagaggggagagcaatagactcttcacggaaccgtgggcttctgcctccgggtaaaataaactgcaaaaaggattcccaggaaaccgttccctctttcagcccttggttacaggaagccggatttgggaaatctgcctggatgacattcacatgaacgggcacatacaggaaaacacggtaatgtaattagaatagtcagagaaaagtagccagaaatgacattcacatgaacgggcacatacaggagaaaacacggtaacgtaattagaatagtcagagaaaagtagccagaaatgacattcacatgaacgggcacatataggagaaaccatggtaacgtaattagaatagtcagagaaaagtagccagaaatgacattcacatgaacgggcacatacaggaaaacacggtaatgtaattagaatagtcagagaaaagtagccagaaatgacattcacatgaacgggcacatacaggagaaaacacggtaacgtaattagaatagtcagagaaaagtagccagaaatgacattcacatgaacgggcacatacaggagaaaacacggtaacgtaattagaatagtcagagaaaagtagccagaagaatttgcaacgtgcccttgtaacaccaaatttgatcagttttttaaaaaatgatcgttatgtaggtgattgagaagtaaatgtattcttttttaaggtaaaaatttggacccttatcatgcatacccccctctgtgctcttcaaatcaacatcattattaatatctgtacatttttgctcatctgagccagcacaggctgaggctgtcagaatggacaccttttggttgttgggtttctgtcagtttctggggtgaagctgcgtgattgagaacgtagctcttggctgccatctcggggattattaaggactgtgaactctatccacaagccatggcaatatctgtcccaccgaatgctccctctaacacactcttactcccgtgatgtgtgttaagggctccgatgatgctgaaaacagcacaggatgtgaaaaggcaggaacagttctgaagtcaaaggctgatgtcctgtttctctttccctctgtgaccgactcccttcccagtggtaacaagtacccacagcttggtttgaatttctgcacgctgttgtctgtgcactcgctcacacttacgcacacagcaggcatgtgggcgatgctgggtattttgtgtatgagtgggatgcacatacacacatctacatccatatcatgcccatgcatctgtaacttgcttttcccgtgtaagaacacttcttagagtttgttcaatgcatgtgtctgtgtgaatgattgaaggcatttctaacccattttaaagatggctacttaggaccatatggatgttgtactgatgtcatttgaccacgtccattgtttccatcttttgggctgttcttgtgtattttactttccatgtaacactgtgacattgagaattggtacctacaacagtctatttgctttacattaaatttgtaggct

SEQ ID NO: 1119 - DNA, 3997 bp, Homo sapiens
gccctgctgcccctgagcacacggacccgtccgaaccgcggggcagtgtgtcctgctgctccctgctgcggggactgtcctcagggtggtcctcacctctgcttccggcccctgtgtgcaaccctaacaaggccatcttcacggtggatgccaagaccacagagatcctcgttgctaacgacaaagcttgcgggctcctggggtacagcagccaggacctgattggccagaagctcacgcagttctttctgaggtcagattctgatgtggtggaggccctcagcgaggagcacatggaggccgacggccacgctgcggtggtgtttggcacggtggtggacatcatcacccgtagtggggagaagattccagtgtctgtgtggatgaagaggatgcggcaggagcgccgcctatgctgcgtggtggtcctggagcccgtggagagggtctcgacctgggtcgctttccagagcgatggcaccgtcacgtcatgtgacagtctctttgctcatcttcacgggtacgtgtctggggaggacgtggctgggcagcatatcacagacctgatcccttctgtgcagctccctccttctggccagcacatcccaaagaatctcaagattcagaggtctgttggaagagccagggacggtaccaccttccctctgagcttaaagctgaaatcccaacccagcagcgaggaggcgaccaccggtgaggcggcccctgtgagcggctaccgggcatctgtctgggtgttctgcaccatcagtggcctcatcaccctcctgccggatgggaccatccacggcatcaaccacagcttcgcgctgacactgtttggttacggaaagacggagctcctgggcaagaatatcactttcctgattcctggtttctacagctacatggaccttgcgtacaacagctcattacagctcccagacctggccagctgcctggacgtcggcaatgagagtgggtgtggggagagaaccttggacccgtggcagggccaggacccagctgaggggggccaggatccaaggattaatgtcgtgcttgctggtggccacgttgtgccccgagatgagatccggaagctgatggaaagccaagacatcttcaccgggactcagactgagctgattgctggaggccagctcctttcctgcctctcacctcagcctgctccaggggtggacaatgtcccagaaggaagcctgccagtgcacggtgaacaggcgctgcccaaggaccagcaaatcactgccttggggagagaggaacctgtggcaatagagagccccggacaggatcttctgggagaaagcaggtctgaaccagtggatgtgaagccatttgcttcctgcgaagattctgaagctccagtcccagctgaggatgggggcagtgatgctggcatgtgtggcctgtgtcagaaggcccagctagagcggatgggagtcagtggtcccagcggttcagacctttgggctggggctgccgtggccaagccccaggccaagggtcagctggcggggggcagcctcctgatgcactgcccttgctatgggagtgaatggggcttgtggtggcgaaggcaggacttggcccccagcccctctgggatggcaggcctctcgtttgggacacctactctagatgagccgtggctgggagtggaaaacgaccgagaagagctgcagacctgcttgattaaggagcagctgtcccagttgagccttgcgggagccctggatgtcccccacgccgaactcgttccgacagagtgccaggctgtcaccgctcctatgtcctcctgcgatctgggaggcagagacctgtgcggtggctgcacgggcagctcctcagcctgctatgccttggccacggacctccctgggggcctggaagcagtggaggcccaggaggttgatgtgaattcgttttcctggaacctcaaggaactctttttcagtgaccagacagaccaaacgtcatcaaattgttcctgtgctacgtctgaactcagagagacaccctcttccttggcagtgggctccgatccagatgtaggcagtctccaggaacaggggtcgtgtgtcctggatgacagggagctgttactactgaccggcacctgtgttgaccttggccaaggccgacggttccgggagagctgtgtgggacatgatccaacagaaccgcttgaggtttgtttggtgtcctctgagcattatgcagcaagcgacagagaaagcccaggacacgttccttccatgttggatgctggccctgaggacacgtgcccatcagcagaggagccaaggctgaacgtccaggtcacctccacgcccgtgatcgtgatgcgcggggctgctggcctgcagcgggagatccaggagggtgcctactccgggagctgctaccatcgagacggcttacggctgagtatacagtttgaggtgaggcgggtggagctccagggccccacacctctgttctgctgctggctggtgaaagacctcctccacagccaacgcgactcagccgccaggacccgcctgttccttgccagcctgcccggctccacccactctaccgctgctgagctcaccggacccagcctggtggaagtgctcagagccagaccctggtttgaggagccccccaaggctgtggaactggaggggttggcggcctgtgagggcgagtactcccaaaagtacagtaccatgagcccgctgggcagtggggccttcggcttcgtgtggactgctgtggacaaggaaaaaaacaaggaggtggtggtgaagtttattaagaaggagaaggtcttggaggattgttggattgaggatcccaaacttgggaaagttactttagagatcgcaattctatccagggtggagcacgccaatatcatcaaggtattggatatatttgaaaaccaagggttcttccagcttgtgatggagaagcacggctccggcctagacctcttcgctttcatcgaccgccaccccaggctggatgagcccctggcgagctacatcttccgacaagtgagagcaggccagagccgtctagtgtcagcagtgggatacctgcgcttgaaggacatcatccaccgtgacatcaaggatgagaacatcgtgatcgctgaggacttcacaatcaagctgatagactttggctcggccgcctacttggaaaggggaaaattattttatactttttgtgggaccatcgagtactgtgcaccggaagttctcatggggaatccctacagagggccggagctggagatgtggtctctgggagtcactctgtacacgctggtctttgaggagaaccccttctgtgagctggaggagaccgtggaggctgccatacacccgccatacctggtgtccaaagaactcatgagccttgtgtctgggctgctgcagccagtccctgagagacgcaccaccttggagaagctggtgacagacccgtgggtaacacagcctgtgaatcttgctgactatacatgggaagaggtgtgtcgagtaaacaagccagaaagtggagttctgtccgctgcgagcctggagatggggaacaggagcctgagtgatgtggcccaggctcaggagctttgtgggggccccgttccaggcgaggctcctaatggccaaggctgtttgcatcccggggatccccgtctgctgaccagctaaacaccaattttttcctgcttttctccacttggtttggaaaatcacacagttttcaggctccatctgtttggagaaaatacattctgaagcatccccaattcaccttctaaaaactcatgtgcaggtttgataaacaccagaacagaagacagtgatgctgtattattttagatttattacatagatttggaattcacttttttcatgacctagaaaaaaacattccagtgttcaactgttttatattattaaagggcttttaatttgtg

SEQ ID NO: 1120 - DNA, 6942 bp, Homo sapiens
ggcatggaacctaaagactagaggcggttgtgtgagtcaggaagaggggccagatatctgagtgttcctctttagtttcttcaattgcagataatatggtgtctaattttatgttgttcaggaaagacagtggttcctgactcaggaagacagtctcagaaacatgtggaatgatattgagctgctaacaaatgatgataccggaagtgggtacctgagtgtcggttcaagaaaagaacatggaactgctttatatcaagtagatttgctagtgaagatctcttctgaaaaggcctcattaaatccaaagatacaggcatgcagcttaagtgatgggtttattattgtagccgaccaatcagtgatattgcttgacagtatttgtagatcacttcaattgcatcttgtctttgatactgaagtggatgtagttggcctttgtcaagaaggaaagtttcttttggttggcgagagaagtggcaacctacatcttattcatgtaacatcaaaacaaacactactcactaatgcatttgttcagaaagctaacgatgaaaatcggcggacttaccagaatcttgtcattgagaaggatggttcaaatgaaggtacctattatatgctacttcttacatacagtggatttttttgtattacaaaccttcagcttttaaaaattcaacaagcaattgagaatgtagacttcagtacagcaaaaaagttacaaggacaaatcaagtccagttttatttctactgaaaattatcatactcttggttgtctcagtcttgtggctggagatttagcaagtgaagttcctgtgataattgggggaaccggtaattgtgcattctcaaaatgggaaccagattcttccaagaaaggaatgacagttaagaaccttattgatgcagagattattaaaggtgcaaagaagttccagctgatagacaatctactttttgttcttgatactgataacgtgctgagtttatgggatatttacactctaactcctgtatggaactggccctctcttcacgtagaagagtttcttcttactacagaagcagactctccttcatcagtcacgtggcaaggaattacaaatctcaaattaatagctctgacagcttcagctaataagaagatgaaaaacctcatggtttattcattacctacaatggaaatactatattctttggaagtatctagtgtttcttctctggtccaaacaggaattagcacagataccatataccttttagaaggagtttgcaaaaatgatccaaaattgtctgaagactcagtctctgtgttagtactcagatgtcttacggaagctttaccagaaaacagattgagtcggttacttcacaaacacagatttgctgaagctgagagttttgccattcagtttggactagatgttgagcttgtttacaaggtcaagtcaaatcatatattggagaaactggcattgagttctgtggatgccagtgaacagaccgaatggcaacaacttgtagacgacgctaaggaaaatctacataagatccaggatgatgaatttgtggtgaattactgcctgaaagctcagtggataacctatgaaaccactcaagagatgctgaattatgccaaaaccaggcttttgaagaaagaagataaaactgctctcatttattctgatggcttgaaagaggtgctaagagctcatgcaaaattgactactttttatggagcatttggaccagaaaaattcagtggcagttcttggattgaatttctaaataatgaagatgatcttaaagatatttttttacagctaaaagaaggaaaccttgtttgtgcacagtatctttggcttcgacatcgggcaaactttgaaagcagatttgatgtgaaaatgctggagagcttgctcaactcaatgtctgcatcagtctctttgcaaaagctgtgtccatggtttaaaaatgatgtgattccatttgtaagaaggactgtgcctgaaggacagataattcttgcaaaatggttggaacaagcagccaggaaccttgaattaactgataaggcaaattggccagaaaatggacttcaattggcagagatattttttacagcagaaaaaacagacgagttgggattggcatcttcctggcattggatttccttgaaagattatcagaacacagaggaagtatgtcagctaaggactttggtaaataacttgcgagagttgatcacgttgcataggaagtacaactgcaaattagccctctctgattttgagaaggaaaatacaaccaccatagtgttccgaatgtttgataaagtgctggccccagagcttattccctccatcttagagaagtttataagagtttacatgagagaacatgacttgcaagaggaggaacttctcttgctgtacatagaggatttactgaatagatgcagctcaaagtccacatcactctttgaaacagcatgggaagcaaaggccatggcagtaatagcgtgtttatctgacacggacctcatatttgatgccgtgctcaagatcatgtatgcggcagtggttccttggagtgcagctgtggagcaactggtgaaacagcacctggaaatggaccatcccaaagtcaagttattacaggaaagttacaaactaatggagatgaaaaaacttttacgaggctatggaataagagaggtaaatctcttaaacaaggaaataatgagagtggttagatacattctcaaacaagatgtcccatcttctttagaagatgctttaaaggtagcccaagcgtttatgttatctgatgatgagatctacagtctaagaattattgacctgattgatagagaacagggtgaagactgtctccttctgttgaagtctttgcctcctgctgaagctgagaaaactgcagaaagagtcatcatatgggcacgactggcattacaagaagagccagatcattctaaagagggcaaggcctggagaatgtctgtagcgaagacatccgtggacattcttaagatactatgtgacattcagaaagacaatctgcagaagaaggacgaatgtgaagaaatgttgaaactatttaaagaggttgctagcttacaggagaactttgaggtctttctttcatttgaagattatagcaatagttccctggtagcagatctccgtgagcagcacattaaagctcacgaagttgcacaggcgaaacacaaacctgggagcaccccagagcccatagctgctgaggtgaggagcccaagcatggaatcaaagctgcacagacaggcactggccctgcagatgtccaaacaagagctggaggcagagctgaccttgagagccttaaaagatgggaacatcaaaacagcactgaaaaaatgcagcgacttgtttaagtatcactgcaatgctgacactgggaaattgctatttctgacatgtcagaagctttgtcagatgttggctgataatgtcccagtgacagtgcctgtgggactgaatcttccttccatgatacatgatctagcaagccaagctgccaccatttgcagtccagattttttactagatgctttagaactatgtaaacatactttaatggctgtagagctttccagacaatgccaaatggatgactgtggaatcctcatgaaagcttcttttgggacacataaagatccatatgaagagtggtcttacagtgacttcttcagtgaagatggaattgttcttgagtcacagatggtgcttccagtgatttatgaactgatttcatctcttgtgcctctagctgaaagcaagagatatcccttggagtctaccagtttgccatactgctcccttaatgaaggagatggccttgttttacctgttataaattccatctctgccctgcttcagaatcttcaggaatctagccagtgggagctagccctaagatttgtggttggttcatttggtacctgtcttcagcactctgtgtcaaacttcatgaatgccactttgagtgaaaagttatttggagagactacattagttaaatcaaggcatgttgttatggaattgaaagaaaaagctgttatatttatcagggaaaatgctacaacactactgcacaaagtatttaattgtcgcttggtagatcttgacctggcgttgggttactgcactctcttacctcaaaaagatgtgtttgaaaatctctggaagctcatagataaagcatggcagaattacgacaaaatcttggcaatatctctggtgggctctgagctggcaagtctctatcaggaaatagaaatggggcttaagttccgtgaactcagtactgatgcccagtggggcattcgtcttggtaaacttggtatttcttttcaaccagttttcaggcaacattttctcaccaagaaagacctcattaaagctcttgtggagaatatagatatggacacaagcctcattttggaatattgcagcacatttcagttggactgcgatgcagttcttcagctcttcattgaaacgctgctccacaacacaaatgccggccaaggccagggagatgcaagcatggactctgcaaagcggcggcatcccaaactcctggccaaagcccttgagatggttcctttactgacgagcacaaaagatttggtcatcagtcttagtggaatactacataagctggatccttatgactatgaaatgattgaagttgtcttgaaagttatagaacgagctgatgaaaagataaccaatattaatattaatcaggcattgagtattctgaaacatttgaagtcatacagaagaatttctcctcccgtggatctagaatatcagtatatgttggaacatgtcataactttgccatcagctgcccaaactagactgccttttcacctgatattctttggcacagcacagaacttctggaaaattctctctacagaactcagtgaagaatctttcccaacattgctcttaatttcgaaattaatgaagttctctctggacactctgtacgtgtctacagcaaaacacgttttcgaaaaaaaactgaagccaaagctcctgaagttaacacaagctaaatcctcaacactgattaacaaggaaataactaagatcacgcagaccatcgaatcctgcttactctctatagtcaacccagagtgggctgtagctattgccatcagccttgcccaggatatccctgaaggttccttcaagatatctgctttgaaattctgcctttatttagctgagagatggctacagaatatcccatcgcaggacgaaaaacgtgaaaaagccgaggctttgttgaagaagcttcatatccagtaccggcgatcgggcacagaagctgtgctcatagcccacaagctgaacactgaggaatatttaagagtgatcggaaagccagcacatcttattgtcagtctctacgaacatcctagcatcaatcaaagaattcagaattcatctggcacagattatcctgatattcatgcagcagctaaagaaatagccgaagtcaatgaaattaatttggaaaaagtctgggacatgttgttggaaaaatggctatgcccttcaacaaaacctggtgaaaaaccatcagaattatttgaacttcaagaagatgaagccctacgaagagtgcagtatctcctcctgtctcgtccaattgattatagttcaagaatgctgtttgtatttgcaacatcaactacaaccacattaggtatgcatcagttaacttttgcccatagaactcgagctcttcagtgtctcttctatttggctgacaaggaaactatagaatctctctttaaaaaacccattgaagaagtgaaatcttatttgagatgtataacttttctggcatcatttgagactttgaatatccccatcacatatgaattattttgcagcagtcctaaagaaggaatgattaagggtctgtggaaaaaccacagccacgagtccatggcagtaagattggtgactgagctgtgtttagaatacaaaatctatgacctgcagctttggaatggactcttgcaaaagcttctgggcttcaatatgattccttatctaaggaaagttttaaaagccatctccagtatccattctttatggcaggttccctacttcagcaaagcgtggcagcgtgtgatacagataccactgctttcagcctcttgtcctttaagtcctgatcagctgtcagattgttctgagagtctcatcgctgtcctcgaatgtccagtctcaggtgatcttgacctgatcggagtcgccaggcagtatatccagttagaacttccggcttttgcattagcttgtctgatgctcatgccccactcagagaaaagacaccagcaaattaagaattttctgggttcctgtgaccctcaggttattttaaagcaattggaagagcatatgaacacgggccagctagcaggattttcacatcaaattagaagtctgattttgaataatatcatcaataagaaggagtttgggattttggcaaagaccaaatactttcaaatgttgaagatgcatgcgatgaataccaacaatatcactgagctagtgaactatttggcaaatgacttaagtttagatgaagcttcagtcttgataactgaatattcaaagcactgcgggaaacctgtgcctccagacactgctccctgtgaaattctgaagatgtttcttagtggattatcgtaaatcactgaacctttttttcaagaaggacaagaattttggagtctgctattaatggaccatatttattacagtttttaaattgtacaatctctgtattatagctatttgtctaacattaccccacatgtaataaataaaacaatatgagc

SEQ ID NO: 1121 - DNA, 2470 bp, Homo sapiens
ttggcgggcggaagcggccacaacccggcgatcgaaaagattcttaggaacgccgtaccagccgcgtctctcaggacagcaggcccctgtccttctgtcgggcgccgctcagccgtgccctccgcccctcaggttctttttctaattccaaataaacttgcaagaggactatgaaagattatgatgaacttctcaaatattatgaattacatgaaactattgggacaggtggctttgcaaaggtcaaacttgcctgccatatccttactggagagatggtagctataaaaatcatggataaaaacacactagggagtgatttgccccggatcaaaacggagattgaggccttgaagaacctgagacatcagcatatatgtcaactctaccatgtgctagagacagccaacaaaatattcatggttcttgagtactgccctggaggagagctgtttgactatataatttcccaggatcgcctgtcagaagaggagacccgggttgtcttccgtcagatagtatctgctgttgcttatgtgcacagccagggctatgctcacagggacctcaagccagaaaatttgctgtttgatgaatatcataaattaaagctgattgactttggtctctgtgcaaaacccaagggtaacaaggattaccatctacagacatgctgtgggagtctggcttatgcagcacctgagttaatacaaggcaaatcatatcttggatcagaggcagatgtttggagcatgggcatactgttatatgttcttatgtgtggatttctaccatttgatgatgataatgtaatggctttatacaagaagattatgagaggaaaatatgatgttcccaagtggctctctcccagtagcattctgcttcttcaacaaatgctgcaggtggacccaaagaaacggatttctatgaaaaatctattgaaccatccctggatcatgcaagattacaactatcctgttgagtggcaaagcaagaatccttttattcacctcgatgatgattgcgtaacagaactttctgtacatcacagaaacaacaggcaaacaatggaggatttaatttcactgtggcagtatgatcacctcacggctacctatcttctgcttctagccaagaaggctcggggaaaaccagttcgtttaaggctttcttctttctcctgtggacaagccagtgctaccccattcacagacatcaagtcaaataattggagtctggaagatgtgaccgcaagtgataaaaattatgtggcgggattaatagactatgattggtgtgaagatgatttatcaacaggtgctgctactccccgaacatcacagtttaccaagtactggacagaatcaaatggggtggaatctaaatcattaactccagccttatgcagaacacctgcaaataaattaaagaacaaagaaaatgtatatactcctaagtctgctgtaaagaatgaagagtactttatgtttcctgagccaaagactccagttaataagaaccagcataagagagaaatactcactacgccaaatcgttacactacaccctcaaaagctagaaaccagtgcctgaaagaaactccaattaaaataccagtaaattcaacaggaacagacaagttaatgacaggtgtcattagccctgagaggcggtgccgctcagtggaattggatctcaaccaagcacatatggaggagactccaaaaagaaagggagccaaagtgtttgggagccttgaaagggggttggataaggttatcactgtgctcaccaggagcaaaaggaagggttctgccagagacgggcccagaagactaaagcttcactataatgtgactacaactagattagtgaatccagatcaactgttgaatgaaataatgtctattcttccaaagaagcatgttgactttgtacaaaagggttatacactgaagtgtcaaacacagtcagattttgggaaagtgacaatgcaatttgaattagaagtgtgccagcttcaaaaacccgatgtggtgggtatcaggaggcagcggcttaagggcgatgcctgggtttacaaaagattagtggaagacatcctatctagctgcaaggtataattgatggattcttccatcctgccggatgagtgtgggtgtgatacagcctacataaagactgttatgatcgctttgattttaaagttcattggaactaccaacttgtttctaaagagctatcttaagaccaatatctctttgtttttaaacaaaagatattattttgtgtatgaatctaaatcaagcccatctgtcattatgttactgtcttttttaatcatgtggttttgtatattaataattgttgactttcttagattcacttccatatgtgaatgtaagctcttaactatgtctctttgtaatgtgtaatttctttctgaaataaaaccatttgtgaatat

SEQ ID NO: 1122 - DNA, 3248 bp, Homo sapiens
ctagaacgaaaggagtgaggcgccgagagcccagataccattttggcgtgagagctggtggttggcaaggccgcgggagtgggaagcgtccgccatgttctgcgaaaaagccatggaactgatccgcgagctgcatcgcgcgcccgaagggcaactgcctgccttcaacgaggatggactcagacaagttctggaggagatgaaagctttgtatgaacaaaaccagtctgatgtgaatgaagcaaagtcaggtggacgaagtgatttgataccaactatcaaatttcgacactgttctctgttaagaaatcgacgctgcactgtagcatacctgtatgaccgcttgcttcggatcagagcactcagatgggaatatggtagcgtcttgccaaatgcattacgatttcacatggctgctgaagaaatggagtggtttaataattataaaagatctcttgctacttatatgaggtcactgggaggagatgaaggtttggacattacacaggatatgaaaccaccaaaaagcctatatattgaagtccggtgtctaaaagactatggagaatttgaagttgatgatggcacttcagtcctattaaaaaaaaatagccagcactttttacctcgatggaaatgtgagcagctgatcagacaaggagtcctggagcacatcctgtcatgaccatgcgccgaggcacttccaggcttcactcaactcatggactcctctgtactcactctctccaccctcccttcacctccctctttgattttagaagctatagacattgtttaagataactaagaatacttggctaagaagtataatttgctaactattaaggactttctttttttaatgttgtacactattcttcctactcttttttggttttggttttgttttgtagagactgtctcactatgttgcccaagctggtctcaaactcctggcctcaagcagtcctcccaccttagcttctcaaagtgttgagatcacaggcgtgagccactgcacccgacccctactcctttttctaataagctgtatctgtaatcacagcattcctacagttgttacagtgtgttttttaaatgaaagtaaacatggttacatttgaatctcttaaataatcagtcacttggctggacaggaagaaggtagatcctgtgtgtcttgttttctggtcatgtgtattgtacaagctagagagctgaatttctgagatacacattttcaaatcacatgcaagtgaagatgatggtctgtagaaattttcagtatatataatgtttaatgacatactaatttatcatctggctatttgggaaggaaggacacacatggattttgcacatttccaccatggtggctggtgtggcttgtggctatggggtgatcaccagtatcaccactttggaaggggacagtgaaattggggctagagaaggaactttgtacagttttccctgagattcagattgactgaaaagtcacatgaagagttgattgtcttttaatggtatgttttaaacagctgacattttaaattttgatgaaatccagtttattcgtttgttcttttatgctttgggtgttgcatccgagaaatcttttcccatcccaagatcacaattttttttcctttttacttctagaagtgttataattttaagctttatactttggtctatgacccgtttttttttttgttttgttttgttttttcgtttgtttctttgttttgagatggagtcttgttctgtcacccaggctggggtgcagtggcgtgatcttggctcactgcaatctctatcccctgggttcaagtgattctcttgtctcagcctcccaagtagctgggattacaggcacaggccgccacgcccggctaatttttgtatttttagtagagacagagttttaccatgttggccaggctggtttcaaactcctgacctcaagtgacccaccttggcctcccaaagttttgggattacaagtgtgggccaccgcggccagcctatgatccattttgaatgaattttttatatggtgcaaggtgtcaatccaccttcactttttcttgggaatatagatatccagctgtttcactaccattttttgaaaggactgccctttgctctatcacctttgcatttttgttaaaaagtagttgtcaatgtatatgtgggtttatttcaggactctgttttgttccattgacctgtttttctctcctgaatgccaataccatatttgtatgtagtgtatgtaattttctaataattcttgaaacagatagtattaatgcgtcatatttttgctgttgtttgtattttttgtggagatggggtttcaccatgttggccaggctgtgttgaactcctgagctaaagcaatacacttgcctcgtcctccccatgtgctgggattacaggcgtgagccttggtgctggcccagtgtaccacatttctttttgagatttgttttggctatgttaagtcctttgcttttgatgtgaaatttgggaacaggcagggtgtggtggcttatgcctgtaatcctagaactttgggaggcctagatgggtggatcacttgagctcaggagttccagaccagcccgggcctatggcgaaactccgtctctacaaaaaatagaaaaaattagccaggtgtggtggtgcatgcctgtagtcacagttacacggcaggctgaggtgggaggatcacttgaaccccagaggtcaagactgcagtgagctgagatcacaccactgtactccagcctgggtgacaaagtgagactctatctcaaaaagaaattaggatcaacttgtcaatttctacaacaacaacaacaaaaacccctgttgggcaccttgattgagattgcattgaatttatataaaactgttgggagaattgacatcttaataatattgagtcttctggcctataaacaaggtctgtcttcctaggtattaatgttttgtcttctatttctcttaataatcttttgtagttttcagtgtacaggtctaccatgtcagcatttcatagttttgatgctaaatggtattttaaaatttcaaattctaaccacttgttgctagtaaatagaaatacaattgatgttgaacttgtatccttcagccttgctaaactgtgagttctcatggtgtttttgtaaattacatcaacagtcatgtgttctatgaataaagagttttactccttc

SEQ ID NO: 1123 - DNA, 2625 bp, Homo sapiens
cttctcttgcacttgcggatgatgaactggaataacgatgaaagaaagcacatccgatctcaacattcacgtcctgccctataaccgattaattaattgatccccagctagactagtgttggagaaatcagcatgttaaaacaactgttgatgatagctgttggagtaaagttgcagtggaagctatggctgcaaaatcgttaaaatcttcaaggtgaactggcacaaaggttaatctcaagatgccgctagtgaaaagaaacatcgatcctaggcacttgtgccacacagcactgcctagaggcattaagaatgaactggaatgtgtaaccaatatttccttggcaaatataattagacaactaagtagcctaagtaaatatgctgaagatatatttggagaattattcaatgaagcacatagtttttccttcagagtcaactcattgcaagaacgtgtggaccgtttatctgttagtgttacacagcttgatccaaaggaagaagaattgtctttgcaagatataacaatgaggaaagctttccgaagttctacaattcaagaccagcagcttttcgatcgcaagactttgcctattccattacaggagacgtacgatgtttgtgaacagcctccacctctcaatatactcactccttatagagatgatggtaaagaaggtctgaagttttataccaatccttcgtatttctttgatctatggaaagaaaaaatgttgcaagatacagaggataagaggaaggaaaagaggaagcagaagcagaaaaatctagatcgtcctcatgaaccagaaaaagtgccaagagcacctcatgacaggcggcgagaatggcagaagctggcccaaggtccagagctggctgaagatgatgctaatctcttacataagcatattgaagttgctaatggcccagcctctcattttgaaacaagacctcagacatacgtggatcatatggatggatcttactcactttctgccttgccatttagtcagatgagtgagcttctgactagagctgaggaaagggtattagtcagaccacatgaaccacctccacctccaccaatgcatggagcaggagatgcaaaaccgatacccacctgtatcagttctgctacaggtttgatagaaaatcgccctcagtcaccagctacaggcagaacacctgtgtttgtgagccccactcccccacctcctccaccacctcttccatctgccttgtcaacttcctcattaagagcttcaatgacttcaactcctccccctccagtacctcccccacctccacctccagccactgctttgcaagctccagcagtaccaccacctccagctcctcttcagattgcccctggagttcttcacccagctcctcctccaattgcacctcctctagtacagccctctccaccagtagctagagctgccccagtatgtgagactgtaccagttcatccactcccacaaggtgaagttcaggggctgcctccacccccaccaccgcctcctctgcctccacctggcattcgaccatcatcacctgtcacagttacagctcttgctcatcctccctctgggctacatccaactccatctactgccccaggtccccatgttccattaatgcctccatctcctccatcacaagttatacctgcttctgagccaaagcgccatccatcaaccctacctgtaatcagtgatgccaggagtgtgctactggaagcaatacgaaaaggtattcagctacgcaaagtagaagagcagcgtgaacaggaagctaagcatgaacgcattgaaaacgatgttgccaccatcctgtctcgccgtattgctgttgaatatagtgattcggaagatgattcagaatttgatgaagtagattggttggagtaagaaaaatgcattgataaatattacaaaactgaatgcaaatgtcctttgtggtgcttgttccttgaaaatgtttggtcattctagtgttttgctttcttttccttataataaatgacccttttcctccataacttttgatttctaaggaaaatattagcatacatttcaaactaaatgttttacagtggcttatcttttttttccccctgaaaagactaatttggtcaaataaaccactaagtattaagcatggacagctgttgttagagtagcagattcagttttttgatatatcttaattgtgtactttgtgaattttaatttaaagaaagcaactgaaattgaaatcttgagggcagctgtatctactaatgagccttattccatttcctgatgttttaaaagaagaaacactgccttgattatacgaatacactcagaaagtacatttagcttgtagtgttgaattctcttaaaggaatgcttgaattttttcattattgttttattgtttttatatacttgccttatttgaatgtttagcagtatccccttcccacttatatattgtgtgatatgattttgcttgcctataggagttaaaaacttttccatgtgaaatactctgacttaaacatacatgtaacttacataactgttaagaataacagtctgatttaataaatggttcattttaaaagtt

SEQ ID NO: 1124 - DNA, 1479 bp, Homo sapiens
cgagctgccatgagcctctgggtggacaagtatcggccctgctccttgggacggctggactatcacaaggagcaggcggcccagctgcggaacctggtgcagtgtggtgactttcctcatctgttagtgtacggaccatcaggtgctggaaaaaagacaagaattatgtgtattttacgtgaactttatggtgttggagtggaaaaattgagaattgaacatcagaccatcacaactccatctaaaaaaaaaattgaaattagcaccattgcaagtaactaccaccttgaagttaatcctagtgatgctggaaatagtgaccgagtagtcattcaggagatgttgaaaacagtggcacaatcacaacaacttgaaacaaactctcaaagggattttaaagtggtattattgacagaagttgacaaactcaccaaagatgctcagcatgccttgcgaagaaccatggaaaaatatatgtctacctgcagattgatcttgtgctgcaattctacatctaaagtgatcccacctattcgtagtaggtgcttggcggttcgtgtgcctgctcccagcattgaagatatttgccacgtgttatctactgtgtgtaagaaggaaggtctgaatcttccttcacaactggctcatagacttgcagagaagtcttgtagaaatctcagaaaagccctgcttatgtgtgaagcctgcagagtgcaacaatatccttttactgcagatcaagaaatccctgagacagattgggaggtgtatctgagggagactgcaaatgctattgtcagtcagcaaactccacaaaggctccttgaagttcgtggaaggctgtatgagcttctaactcattgtattcctcctgagataataatgaagggccttctctcagaactgttacataattgtgatggacaactgaaaggggaggtggcacaaatggcagcttactatgagcatcgtctacagctgggtagcaaagccatttatcacttggaagcgtttgtggccaaattcatggcactttataagaagttcatggaggatggattggaaggcatgatgttctgacttctgtcagttattcttgcaaagatttctcagtatcagtatttacatacagcttatattaaaagagctgtgggtaaattaactgaacttaatcatgtcgtatttgggtttttttggtaataacttctctgtgaactattaatcatcctctgagttaaataattgctcctatactattgaagtatgtagttttgtacataacttagagactttagagtctaagaaaatgatcttaatttactttaagcattggttattcaagtattcattgttgatcctcctattctcttccgtctaatctctcacctgctaaaggagatttacacattagaaagcaaagattattttcatttatccagatgaccattttctgccacaggtaacatgattgtttgacgg

SEQ ID NO: 1125 - DNA, 1924 bp, Homo sapiens
taggaaactaacattatggatttttccaagctacccaaaatactcgatgaagataaagaaagcacatttggttatgtgcatggggtctcaggacctgtggttacagcctgtgacatggcgggtgcagccatgtatgagctggtgagagtgggccacagcgaattggttggagagattattcgattggagggtgacatggctactattcaggtgtatgaagaaacttgtggtgtgtctgttggagatcctgtacttcgcactggtaaacccctctctgtagacgttggtcctggcattatgggagccatttttgatggtattcaaagacctttgtcggatatcagcagtcagacccaaagcatctacatccccagaggagtaaacgtgtctgctcttagcagagatatcaaatgggactttacaccttgcaaaaacctacgggttggtagtcatatcactggcggagacatttatggaattgtcagtgagaactcgcttatcaaacacaaaatcatgttacccccacgaaacagaggaactgtaacttacattgctccacctgggaattatgatacctctgatgttgtcttggagcttgaatttgaaggtgtaaaggagaagttcaccatggtgcaagtatggcctgcacgtcaagttcgacctgtcactgagaagctgccagccaatcatcctctgttgactggccagagagtccttgatgccctttttccgtgtgtccagggaggaactactgctatccctggagcctttggctgtggaaagacagtgatatcacagtctctatccaagtattctaacagtgatgtaatcatctatgtaggatgtggtgaaagaggaaatgagatgtctgaagtcctccgggacttcccagagctcacaatggaggttgatggtaaggtagagtcaattatgaagaggacagctttggtagccaatacctccaatatgcctgttgctgctagagaagcctctatttatactggaatcacactgtcagagtacttccgtgacatgggctatcatgtcagtatgatggctgactctacctctagatgggctgaggcccttagagaaatctctggtcgtttagctgaaatgcctgcagatagtggatatccagcctatcttggtgcccgtctggcctcgttttatgaacgagcaggcagggtgaaatgtcttggaaatcctgaaagagaagggagtgtcagcattgtaggagcagtttctccacctggtggtgatttttctgatccagttacatctgccactcttggtatcgttcaggtgttctggggcttagataagaaactagctcaacgtaagcatttcccctctgtcaattggctcatcagctacagcaagtatatgcgtgccttggatgaatactatgacaaacacttcacagagttcgttcctctgaggacgaaagctaaggaaattctgcaggaagaagaagacctggcagaaattgtacagcttgtgggaaaggcttctttggcagaaacagataaaatcactctggaggtagcaaaacttatcaaagatgatttcctacaacaaaatggatatactccttatgacaggttctgcccattctacaagacagtagggatgctgtccaacatgattgcattttatgatatggctcgtagagctgttgaaaccactgcccagagtgacaataaaatcacatggtccattattcgtgagcacatgggagacatcctctataaactttcctccatgaaattcaaggatccactgaaagatggtgaggcaaagatcaaaagcgactatgcacaacttcttgaagacatgcagaatgcattccgtagccttgaagattagaagccttgaagattacaactgtgatttccttttcctcagcaagctcctccggaat

SEQ ID NO: 1126 - DNA, 2309 bp, Homo sapiens
  misc_feature: n=a,t,g or c
tttgtcttcaagagtttttcgagaccagggaagaaggaaggaaatgcccagtttgatcgtgggagtggtaaaatgataaagtagatctgggtggggtttgtagcaccagagcataatggagaaacaccttggttttgtaatcaagactggatctaccagtgacttgctgaataacttcggtgattcctttctcttcttgggtctcactgtatttcaaaacatgaagaatttcattgtaatgttacctaataagtgagccagcacttctactctgtgagaaagtaggaaaactcttgggacaatcagagatgatgtgatgtaatgtccattagttcttcctgtgaataatcctgagggaaagcccccaggtccctcccagaatggggtggatatttcccaatacagctaaggaattatcccttgtaaataccacagacccgccctggagccaggccaagctggactgcataaagattggtatggccttagctcttagccaaacaccttcctgacaccatgagggccagcagcttcttgatcgtggtggtgttcctcatcgctgggacgctggttctagaggcagctgtcacgggaggtgagtgaacaggtgacctgctgggctgggttggactaaggggagaccctctggacaccctgggccaggacagggagcactactgaagcagtaggcagcactggagcccagatttcagctttctgttctttgccatcatattcagaaaaaataggactttggctggtggactccacgtgctttccacctcagtgactgagatatcaggactgtttgtggaagtaatgttggtatgtggccttggcctcagatgtcaatacctgtgcagaatgtgcaataaaataatgaactccaggattttaaaccttgggtgtggacacagtccccgtttctctgccccataaaagcactggagtaatcagtactctaaaaggaggttaagaaacaacaagccttcaggaatcatgttgtttgaggacccccattttataaggagggaaccaaaaatgtagaaatgagtgagcaattgccaaggtaattcccagagccaggatggggctcaagtctcctagtatgtggctcagggttctttcctactccaatgcacttcctaacaaatgacaatgtgtcctcttcactgctgggtgtcaccccagtctgaccactgctcctgagagacttggagtggaggaagggggaagaaacaaatactcaagggaactctggtcctgtagaccaccccaaaaaaggaagagccttccaagagtgtagctcccagaggtgtaccttccctactcaggccatggtttgaggatgctgcagtaagcagtggatggacccagacccagaggaaagacatggcagctgaagcagaggcttactgggtataaatgtgggctcgtttcttcttttaacagttcctgttaaaggtcaagacactgtcaaaggccgtgttccattcaatggacaagatcccgttaaaggacaagtttcagttaaaggtcaagataaagtcaaagcgcaagagccagtcaaaggtccagtctccactaagcctggctcctgccccattatcttgatccggtgcgccatgttgaatccccctaaccgctgcttgaaagatactgactgcccaggaatcaagaagtgctgtgaaggctcttgcgggatggcctgtttcgttccccagtgaggtgagcactagctggagaacgaggagacccctgaagacacaaaagaaggctgagcggtggggaagcatcccaggttggtgggagggaggttgtgggaggtgacagaaagactgggagactgaggggtctgagaggctataaccagagtgcctagaaggatgatctgtcttcctcactgcctctgagtgctttgatgtgctgactctcacctctgatactcttctcttccacagagggagccggtccttgctgcacctgtgccgtccccagagctacaggccccatctggtcctaagtccctgctgcccttccccttcccacactgtccattcttcctcccattcaggatgcccacggctggagctgcctctctcatccactttccaataaagacttccttctgctccacttgtttctggttcctatgacttctgggctcctggatgctttggggaaatggatgtagaattgggacttcttctctccagtgaagaggggaaacggtcccatggtgaaagagagcaggnnggaggaaacaaggaggcacatgctagggcttcatattacaatccaataatcag

SEQ ID NO: 1127 - DNA, 1778 bp, Homo sapiens; identical to SEQ ID NO: 53

SEQ ID NO: 1128 - DNA, 3107 bp, Homo sapiens
aagcggcaggagcagcgttggcaccggcgaaccatggctgggattttctatttcgccctattttcgtgtctcttcgggatttgcgacgctgtcacaggttccagggtataccccgcgaatgaagttaccttattggattccagatctgttcagggagaacttgggtggatagcaagccctctggaaggagggtgggaggaagtgagtatcatggatgaaaaaaatacaccaatccgaacctaccaagtgtgcaatgtgatggaacccagccagaataactggctacgaactgattggatcacccgagaaggggctcagagggtgtatattgagattaaattcaccttgagggactgcaatagtcttccgggcgtcatggggacttgcaaggagacgtttaacctgtactactatgaatcagacaacgacaaagagcgtttcatcagagagaaccagtttgtcaaaattgacaccattgctgctgatgagagcttcacccaagtggacattggtgacagaatcatgaagctgaacaccgagatccgggatgtagggccattaagcaaaaaggggttttacctggcttttcaggatgtgggggcctgcatcgccctggtatcagtccgtgtgttctataaaaagtgtccactcacagtccgcaatctggcccagtttcctgacaccatcacaggggctgatacgtcttccctggtggaagttcgaggctcctgtgtcaacaactcagaagagaaagatgtgccaaaaatgtactgtggggcagatggtgaatggctggtacccattggcaactgcctatgcaacgctgggcatgaggagcggagcggagaatgccaagcttgcaaaattggatattacaaggctctctccacggatgccacctgtgccaagtgcccaccccacagctactctgtctgggaaggagccacctcgtgcacctgtgaccgaggctttttcagagctgacaacgatgctgcctctatgccctgcacccgtccaccatctgctcccctgaacttgatttcaaatgtcaacgagacatctgtgaacttggaatggagtagccctcagaatacaggtggccgccaggacatttcctataatgtggtatgcaagaaatgtggagctggtgaccccagcaagtgccgaccctgtggaagtggggtccactacaccccacagcagaatggcttgaagaccaccaaagtctccatcactgacctcctagctcataccaattacacctttgaaatctgggctgtgaatggagtgtccaaatataaccctaacccagaccaatcagtttctgtcactgtgaccaccaaccaagcagcaccatcatccattgctttggtccaggctaaagaagtcacaagatacagtgtggcactggcttggctggaaccagatcggcccaatggggtaatcctggaatatgaagtcaagtattatgagaaggatcagaatgagcgaagctatcgtatagttcggacagctgccaggaacacagatatcaaaggcctgaaccctctcacttcctatgttttccacgtgcgagccaggacagcagctggctatggagacttcagtgagcccttggaggttacaaccaacacagtgccttcccggatcattggagatggggctaactccacagtccttctggtctctgtctcgggcagtgtggtgctggtggtaattctcattgcagcttttgtcatcagccggagacggagtaaatacagtaaagccaaacaagaagcggatgaagagaaacatttgaatcaaggtgtaagaacatatgtggacccctttacgtacgaagatcccaaccaagcagtgcgagagtttgccaaagaaattgacgcatcctgcattaagattgaaaaagttataggagttggtgaatttggtgaggtatgcagtgggcgtctcaaagtgcctggcaagagagagatctgtgtggctatcaagactctgaaagctggttatacagacaaacagaggagagacttcctgagtgaggccagcatcatgggacagtttgaccatccgaacatcattcacttggaaggcgtggtcactaaatgtaaaccagtaatgatcataacagagtacatggagaatggctccttggatgcattcctcaggaaaaatgatggcagatttacagtcattcagctggtgggcatgcttcgtggcattgggtctgggatgaagtatttatctgatatgagctatgtgcatcgtgatctggccgcacggaacatcctggtgaacagcaacttggtctgcaaagtgtctgattttggcatgtcccgagtgcttgaggatgatccggaagcagcttacaccaccaggggtggcaagattcctatccggtggactgcgccagaagcaattgcctatcgtaaattcacatcagcaagtgatgtatggagctatggaatcgttatgtgggaagtgatgtcgtacggggagaggccctattgggatatgtccaatcaagatgtgattaaagccattgaggaaggctatcggttaccccctccaatggactgccccattgcgctccaccagctgatgctagactgctggcagaaggagaggagcgacaggcctaaatttgggcagattgtcaacatgttggacaaactcatccgcaaccccaacagcttgaagaggacagggacggagagctccagacctaacactgccttgttggatccaagctcccctgaattctctgctgtggtatcagtgggcgattggctccaggccattaaaatggaccggtataaggataacttcacagctgctggttataccacactagaggctgtggtgcacgtgaaccaggaggacctggcaagaattggtatcacagccatcacgcaccagaataagattttgagcagtgtccaggcaatgcgaacccaaatgcagcagatgcacggcagaatggttcccgtctgagccagtactgaataaactcaaaactcttgaaattagtttacctcatccatgcactttaattgaagaactgcactttttttacttcgtcttcgccctctgaaattaaagaaatg

SEQ ID NO: 1129 - DNA, 993 bp, Homo sapiens
atgatcaccctgaacaatcaagatcaacctgtcacttttaacagctcacatccagatgaatacaaaattgcagcccttgtcttctatagctgtatcttcataattggattatttgttaacatcactgcattatgggttttcagttgtaccaccaagaagagaaccacggtaaccatctatatgatgaatgtggcattagtggacttgatatttataatgactttaccctttcgaatgttttattatgcaaaagatgcatggccatttggagagtacttctgccagattattggagctctcacagtgttttacccaagcattgctttatggcttcttgcctttattagtgctgacagatacatggccattgtacagccgaagtacgccaaagaacttaaaaacacgtgcaaagccgtgctggcgtgtgtgggagtctggataatgaccctgaccacgaccacccctctgctactgctctataaagacccagataaagactccactcccgccacctgcctcaagatttctgacatcatctatctaaaagctgtgaacgtgctgaacctcactcgactgacattttttttcttgattcctttgttcatcatgattgggtgctacttggtcattattcataatctccttcacggcaggacgtctaagctgaaacccaaagtcaaggagaagtccataaggatcatcatcacgctgctggtgcaggtgctcgtctgctttatgcccttccacatctgtttcgctttcctgatgctgggaacgggggagaacagttacaatccctggggagcctttaccaccttcctcatgaacctcagcacgtgtctggatgtgattctctactacatcgtttcaaaacaatttcaggctcgagtcattagtgtcatgctataccgtaattaccttcgaagcctgcgcagaaaaagtttccgatctggtagtctaaggtcactaagcaatataaacagtgaaatgtta

SEQ ID NO: 1130 - DNA, 1092 bp, Homo sapiens
gaattcggcacgagtggaaacgcagagcgccggggcagaggagggctttacccaggtcacccgcaagggtggccgacgggcgaagaaacgacaggctgaacagctgtccgcagcaggagagggcggggatgcgggccgcatggacacagaggaggccaggccggcgaagaggcccgtcttcccacccctctgtggggacgggctcctgagtgggaaagaagaaacaaggaaaattccagtcccagctaacagatacacaccattgaaagaaaactggatgaagatatttactcctattgtggaacatttgggacttcagatacgctttaacttggaaatcaaggaatgtgaaatcaggacttgtaagaaccaaggatgttagtgctctgacaaaagcagtgatttgtgaaagcttttattctcggctttcaggtggaggatgcacttgccctcatcaggttggatgacctcttcctagagtcttttgaaattacagatgttaaacccctaaagggagaccatctatccagggcaataggaagaatcgctggcaaaggaggaaaaaccaaattcaccatagagaatgtgacacggacaaggatagttttggctgatgtgaaagttcacatccttggctccttccaaaatatcaagatggcaagaactgccatttgcaacctaatcttgggaaatcctccttccaaggtttatggcaatattcgagctgtggctagcagatcagcagatcgattctgatttcaagtcagagactttttatcttgcctttggactctggtgaaaaatactttacagtggtcggtcacaagaaaccatctgaacaatttcagtcatttgaagctccgtcccttcttccattctcagccagaagcataaacagaaaagaaagatttagaggattcacactcaacaggttttaggatatttatatcaaaaattgattgttatcttacacattaggtataatttatcatttatctgaaatcacatgtagcagattgcatagtcttgtaatcctctcagagggaaacttcttgtctaaacagctctatatggatttatcctccatattcc

SEQ ID NO: 1131 - DNA, 5189 bp, Homo sapiens
tgtgcgccggggaggcgccggcttgtactcggcagcgcgggaataaagtttgctgatttggtgtctagcctggatgcctgggttgcagccctgcttgtggtggcgctccacagtcatccggctgaagaagacctgttggactggatcttctcgggttttctttcagatattgttttgtatttacccatgaagacattgttttttggactctgcaaataggacatttcaaagatgagtgaaaaaaaattggaaacaactgcacagcagcggaaatgtcctgaatggatgaatgtgcagaataaaagatgtgctgtagaagaaagaaaggcatgtgttcggaagagtgtttttgaagatgacctccccttcttagaattcactggatccattgtgtatagttacgatgctagtgattgctctttcctgtcagaagatattagcatgagtctatcagatggggatgtggtgggatttgacatggagtggccaccattatacaatagagggaaacttggcaaagttgcactaattcagttgtgtgtttctgagagcaaatgttacttgttccacgtttcttccatgtcagtttttccccagggattaaaaatgttgcttgaaaataaagcagttaaaaaggcaggtgtaggaattgaaggagatcagtggaaacttctacgtgactttgatatcaaattgaagaattttgtggagttgacagatgttgccaataaaaagctgaaatgtacagagacctggagccttaacagtctggttaaacacctcttaggtaaacagctcctgaaagacaagtctatccgctgtagcaattggagtaaatttcctctcactgaggaccagaaactgtatgcagccactgatgcttatgctggttttattatttaccgaaatttagagattttggatgatactgtgcaaaggtttgctataaataaagaggaagaaatcctacttagcgacatgaacaaacagttgacttcaatctctgaggaagtgatggatctggctaagcatcttcctcatgctttcagtaaattggaaaacccacggagggtttctatcttactaaaggatatttcagaaaatctatattcactgaggaggatgataattgggtctactaacattgagactgaactgaggcccagcaataatttaaacttattatcctttgaagattcaactactgggggagtacaacagaaacaaattagagaacatgaagttttaattcacgttgaagatgaaacatgggacccaacacttgatcatttagctaaacatgatggagaagatgtacttggaaataaagtggaacgaaaagaagatggatttgaagatggagtagaagacaacaaattgaaagagaatatggaaagagcttgtttgatgtcgttagatattacagaacatgaactccaaattttggaacagcagtctcaggaagaatatcttagtgatattgcttataaatctactgagcatttatctcccaatgataatgaaaacgatacgtcctatgtaattgagagtgatgaagatttagaaatggagatgcttaagcatttatctcccaatgataatgaaaacgatacgtcctatgtaattgagagtgatgaagatttagaaatggagatgcttaagtctttagaaaacctcaatagtggcacggtagaaccaactcattctaaatgcttaaaaatggaaagaaatctgggtcttcctactaaagaagaagaagaagatgatgaaaatgaagctaatgaaggggaagaagatgatgataaggactttttgtggccagcacccaatgaagagcaagttacttgcctcaagatgtactttggccattccagttttaaaccagttcagtggaaagtgattcattcagtattagaagaaagaagagataatgttgctgtcatggcaactggatatggaaagagtttgtgcttccagtatccacctgtttatgtaggcaagattggccttgttatctctccccttatttctctgatggaagaccaagtgctacagcttaaaatgtccaacatcccagcttgcttccttggatcagcacagtcagaaaatgttctaacagatattaaattaggtaaataccggattgtatacgtaactccagaatactgttcaggtaacatgggcctgctccagcaacttgaggctgatattggtatcacgctcattgctgtggatgaggctcactgtatttctgagtgggggcatgattttagggattcattcaggaagttgggctccctaaagacagcactgccaatggttccaatcgttgcacttactgctactgcaagttcttcaatccgggaagacattgtacgttgcttaaatctgagaaatcctcagatcacctgtactggttttgatcgaccaaacctgtatttagaagttaggcgaaaaacagggaatatccttcaggatctgcagccatttcttgtcaaaacaagttcccactgggaatttgaaggtccaacaatcatctactgtccttctagaaaaatgacacaacaagttacaggtgaacttaggaaacttaatctatcctgtggaacataccatgcgggcatgagttttagcacaaggaaagacattcatcataggtttgtaagagatgaaattcagtgtgtcatagctaccatagcttttggaatgggcattaataaagctgacattcgccaagtcattcattacggtgctcctaaggacatggaatcatattatcaggagattggtagagctggtcgtgatggacttcaaagttcttgtcacgtcctctgggctcctgcagacattaacttaaataggcaccttcttactgagatacgtaatgagaagtttcgattatacaaattaaagatgatggcaaagatggaaaaatatcttcattctagcagatgtaggagacaaatcatcttgtctcattttgaggacaaacaagtacaaaaagcctccttgggaattatgggaactgaaaaatgctgtgataattgcaggtccagattggatcattgctattccatggatgactcagaggatacatcctgggactttggtccacaagcatttaagcttttgtctgctgtggacatcttaggcgaaaaatttggaattgggcttccaattttatttctccgaggatctaattctcagcgtcttgccgatcaatatcgcaggcacagtttatttggcactggcaaggatcaaacagagagttggtggaaggctttttcccgtcagctgatcactgagggattcttggtagaagtttctcggtataacaaatttatgaagatttgcgcccttacgaaaaagggtagaaattggcttcataaagctaatacagaatctcagagcctcatccttcaagctaatgaagaattgtgtccaaagaagtttcttctgcctagttcgaaaactgtatcttcgggcaccaaagagcattgttataatcaagtaccagttgaattaagtacagagaagaagtctaacttggagaagttatattcttataaaccatgtgataagatttcttctgggagtaacatttctaaaaaaagtatcatggtacagtcaccagaaaaagcttacagttcctcacagcctgttatttcggcacaagagcaggagactcagattgtgttatatggcaaattggtagaagctaggcagaaacatgccaataaaatggatgttcccccagctattctggcaacaaacaagatactggtggatatggccaaaatgagaccaactacggttgaaaacgtaaaaaggattgatggtgtttctgaaggcaaagctgccatgttggcccctctgttggaagtcatcaaacatttctgccaaacaaatagtgttcagacagacctcttttcaagtacaaaacctcaagaagaacagaagacgagtctggtagcaaaaaataaaatatgcacactttcacagtctatggccatcacatactctttattccaagaaaagaagatgcctttgaagagcatagctgagagcaggattctgcctctcatgacaattggcatgcacttatcccaagcggtgaaagctggctgcccccttgatttggagcgagcaggcctgactccagaggttcagaagattattgctgatgttatccgaaaccctcccgtcaactcagatatgagtaaaattagcctaatcagaatgttagttcctgaaaacattgacacgtaccttatccacatggcaattgagatccttaaacatggtcctgacagcggacttcaaccttcatgtgatgtcaacaaaaggagatgttttcccggttctgaagagatctgttcaagttctaagagaagcaaggaagaagtaggcatcaatactgagacttcatctgcagagagaaagagacgattacctgtgtggtttgccaaaggaagtgataccagcaagaaattaatggacaaaacgaaaaggggaggtctttttagttaagctggcaattaccagaacaattatgtttcttgctgtattataagaggatagctatattttatttctgaagagtaaggagtagtattttggcttaaaaatcattctaattacaaagttcactgtttattgaagaactggcatcttaaatcagccttccgcaattcatgtagtttctgggtcttctgggagcctacgtgagtacatcacctaacagaatattaaattagacttcctgtaagattgctttaagaaactgttactgtcctgttttctaatctctttattaaaacagtgtatttggaaaatgttatgtgctctgatttgatatagataacagattagtagttacatggtaattatgtgatataaaatattcatatattatcaaaattctgttttgtaaatgtaagaaagcatagttattttacaaattgtttttactgtcttttgaagaagttcttaaatacgttgttaaatggtattagttgaccagggcagtgaaaatgaaaccgcattttgggtgccattaaatagggaaaaaacatgtaaaaaatgtaaaatggagaccaattgcactaggcaagtgtatattttgtattttatatacaatttctattatttttcaagtaataaaacaatgtttttcatactgaatatta

SEQ ID NO: 1132 - DNA, 13500 bp, Homo sapiens; identical to SEQ ID NO: 55
  misc_feature: n=a,t,g or c

SEQ ID NO: 1133 - DNA, 1452 bp, Homo sapiens; identical to SEQ ID NO: 695

SEQ ID NO: 1134 - DNA, 2351 bp, Homo sapiens
gcgcggcggcggacctcgggttgccctcggtccgagtgatccctggtcgcttccttagccctcccgccttcggcattggggtccccgcgtcccccgggcctccaggcgggaaagcgcgggggctttgcggggccttgagcgcctggtgtgggaggtggtcgagcccagccaccctcccccgcggcggcgcgaggtctctcggccagaacacgtggatgcccacccaccactgagcctcatggaggtggtaacatttggcgatgtggctgtgcacttctctcgggaggagtggcagtgtctggaccctggccagagggccctctacagggaagtgatgctggagaaccacagcagtgtggctggactagcaggattcctggttttcaagcctgagctgatctctcggctggagcagggagaagagccatgggtcctcgacctgcagggagcagaggggacagaggcaccaaggacctccaagacagattctacgattaggactgaaaatgagcaggcctgtgaggacatggacatcctaaaatcagaatcctatgggacagtggtcagaatctccccacaggactttcctcagaatcctggctttggagacgtttctgattctgaggtctggttagacagtcatctgggcagtcccgggctgaaagtgacaggctttaccttccaaaataactgtttgaatgaggagactgtggttcccaagaccttcaccaaggacgcaccccagggatgtaaggagctgggaagcagcggcctggattgtcagcctcttgaaagtcagggagagagtgcggaagggatgtcccagagatgcgaggagtgtggcaaaggcatcagagccacttcagatatcgctctgcattgggaaattaatacacagaaaattagcagatgtcaagaatgccaaaaaaagttatctgactgcttgcaggggaaacatacaaataactgccatggagagaagccgtacgaatgtgcagagtgtgggaaagtcttcaggctctgctcgcagcttaatcagcatcagagaatccacacgggagagaaaccctttaaatgcactgagtgtggaaaagccttccgcctgagctcaaaacttattcagcatcaaagaatccacactggggagaagccctacagatgtgaggaatgtggaaaagcttttggtcagagctcaagcctcatccaccatcagagaatccacacaggagagaggccctatggttgtcgtgagtgtgggaaagccttcagccagcagtcgcagctggttagacaccagagaactcacactggggagaggccctacccttgcaaggagtgtgggaaggccttcagccagagctccaccctagcccagcatcaaaggatgcatactggggagaaagctcaaattctaaaagcctcagacagtccaagccttgttgcacatcagagaattcacgctgtagagaaaccatttaagtgtgatgagtgtgggaaagcttttaggtggatctctcgcctgagtcagcatcagctgattcacactggagagaagccttataaatgcaacaagtgtacaaaagcctttggttgtagttcacggcttattcgccatcagagaactcacactggagaaaaaccatttaaatgtgatgagtgtggcaaaggctttgttcagggctcacaccttattcagcatcagcgaatccacactggagagaaaccctatgtgtgtaatgactgtggaaaagccttcagtcagagttccagccttatttaccatcagagaatccataaaggagagaagccctacgaatgcctccaatgcggaaaagccttcagtatgagcacacagcttacaatacatcaaagggttcacactggagagaggccctataaatgtaatgaatgtgggaaagccttcagtcaaaactcaacccttttccaacaccagataattcatgcaggggtgaagccctatgagtgcagtgagtgtggaaaagccttcagccggagctcatatcttattgaacaccagagaatacacactagggcccagtggttttacgaatatgggaatgccctggaagggtccacctttgtgagccgtaaaaaggttaatactataaagaaactgcatcagtgtgaagactgtgagaagatatttaggtggcgttcacacctaattatacaccagagaattcacaccggggagaagccttataaatgcaatgactgtggcaaagcttttaatcgtagctcaaggcttacccagcatcaaaaaattcacatgggatagaccacttacatataaatgtgtatatatgtgaataaacctatagccttaactt

SEQ ID NO: 1135 - DNA, 1523 bp, Homo sapiens
gggtcgatgggggagatggagcaactgcgtcaggaagcggagcagctcaagaagcagattgcagatgccaggaaagcctgtgctgacgttactctggcagagctggtgtctggcctagaggtggtgggacgagtccagatgcggacgcggcggacgttaaggggacacctggccaagatttacgccatgcactgggccactgattctaagctgctggtaagtgcctcgcaagatgggaagctgatcgtgtgggacagctacaccaccaacaaggtgcacgccatcccactgcgctcctcctgggtcatgacctgtgcctatgccccatcagggaactttgtggcatgtggggggctggacaacatgtgttccatctacaacctcaaatcccgtgagggcaatgtcaaggtcagccgggagctttctgctcacacaggttatctctcctgctgccgcttcctggatgacaacaatattgtgaccagctcgggggacaccacgtgtgccttgtgggacattgagactgggcagcagaagactgtatttgtgggacacacgggtgactgcatgagcctggctgtgtctcctgacttcaatctcttcatttcgggggcctgtgatgccagtgccaagctctgggatgtgcgagaggggacctgccgtcagactttcactggccacgagtcggacatcaacgccatctgtttcttccccaatggagaggccatctgcacgggctcggatgacgcttcctgccgcttgtttgacctgcgggcagaccaggagctgatctgcttctcccacgagagcatcatctgcggcatcacgtccgtggccttctccctcagtggccgcctactattcgctggctacgacgacttcaactgcaatgtctgggactccatgaagtctgagcgtgtgggcatcctctctggccacgataacagggtgagctgcctgggagtcacagctgacgggatggctgtggccacaggttcctgggacagcttcctcaaaatctggaactgaggaggctggagaaagggaagtggaaggcagtgaacacactcagcagccccctgcccgaccccatctcattcaggtgttctcttctatattccgggtgccattcccactaagctttctcctttgagggcagtggggagcatgggactgtgcctttgggaggcagcatcagggacacaggggcaaagaactgccccatctcctcccatggccttccctccccacagtcctcacagcctctcccttaatgagcaaggacaacctgcccctccccagccctttgcaggcccagcagacttgagtctgaggccccaggccctaggattcctcccccagagccactacctttgtccaggcctgggtggtatagggcgtttggccctgtgactatggctctggcaccactagggtcctggccctcttcttattcatgctttctcctttttctacctttttttctctcctaagacacctgcaataaagtgtagcaccctggt

SEQ ID NO: 1136 - DNA, 1531 bp, Homo sapiens
agtcacagagggaacacagagcctagttgtaaacggacagagacgagaggggcaagggaggacagtggatgacagggaagacgagtgggggcagagctgctcaggaccatggctgaggccatcacctatgcagatctgaggtttgtgaaggctcccctgaagaagagcatctccagccggttaggacaggacccaggggctgatgatgatggggaaatcacctacgagaatgttcaagtgcccgcagtcctaggggtgccctcaagcttggcttcttctgtactaggggacaaagcagcggtcaagtcggagcagccaactgcgtcctggagagccgtgacgtcaccagctgtcgggcggattctcccctgccgcacaacctgcctgcgatacctcctgctcggcctgctcctcacctgcctgctgttaggagtgaccgccatctgcctgggagtgcgctatctgcaggtgtctcagcagctccagcagacgaacagggttctggaagtcactaacagcagcctgaggcagcagctccgcctcaagataacgcagctgggacagagtgcagaggatctgcaggggtccaggagagagctggcgcagagtcaggaagcactacaggtggaacagagggctcatcaggcggccgaagggcagctacaggcctgccaggcagacagacagaagacgaaggagaccttgcaaagtgaggagcaacagaggagggccttggagcagaagctgagcaacatggagaacagactgaagcccttcttcacatgcggctcagcagacacctgctgtccgtcgggatggataatgcatcagaaaagctgcttttacatctcacttacttcaaaaaattggcaggagagccaaaaacaatgtgaaactctgtcttccaagctggccacattcagtgaaatttatccacaatcacactcttactacttcttaaattcactgttgccaaatggtggttcagggaattcatattggactggcctcagctctaacaaggattggaagttgactgatgatacacaacgcactaggacttatgctcaaagctcaaaatgtaacaaggtacataaaacttggtcatggtggacactggagtcagagtcatgtagaagttctcttccctacatctgtgagatgacagctttcaggtttccagattaggacagtcctttgcactgagttgacactcatgccaacaagaacctgtgcccctccttcctaacctgaggcctggggttcctcagaccatctccttcattctgggcagtgccagccaccggctgacccacacctgacacttccagccagtctgctgcctgctccctcttcctgaaactggactgttcctgggaaaagggtgaagccacctctagaagggactttggcctccccccaagaacttcccatggtagaatggggtgggggaggagggcgcacgggctgagcggataggggcggcccggagccagccaggcagttttattgaaatctttttaaataattg

SEQ ID NO: 1137 - DNA, 2346 bp, Homo sapiens
gcacgaggctgcggcgggtccgggcccatgaggcgacgaaggaggcgggacggcttttacccagccccggacttccgagacagggaagctgaggacatggcaggagtgtttgacatagacctggaccagccagaggacgcgggctctgaggatgagctggaggaggggggtcagttaaatgaaagcatggaccatgggggagttggaccatatgaacttggcatggaacattgtgagaaatttgaaatctcagaaactagtgtgaacagagggccagaaaaaatcagaccagaatgttttgagctacttcgggtacttggtaaagggggctatggaaaggtttttcaagtacgaaaagtaacaggagcaaatactgggaaaatatttgccatgaaggtgcttaaaaaggcaatgatagtaagaaatgctaaagatacagctcatacaaaagcagaacggaatattctggaggaagtaaagcatcccttcatcgtggatttaatttatgcctttcagactggtggaaaactctacctcatccttgagtatctcagtggaggagaactatttatgcagttagaaagagagggaatatttatggaagacactgcctgcttttacttggcagaaatctccatggctttggggcatttacatcaaaaggggatcatctacagagacctgaagccggagaatatcatgcttaatcaccaaggtcatgtgaaactaacagactttggactatgcaaagaatctattcatgatggaacagtcacacacacattttgtggaacaatagaatacatggcccctgaaatcttgatgagaagtggccacaatcgtgctgtggattggtggagtttgggagcattaatgtatgacatgctgactggagcacccccattcactggggagaatagaaagaaaacaattgacaaaatcctcaaatgtaaactcaatttgcctccctacctcacacaagaagccagagatctgcttaaaaagctgctgaaaagaaatgctgcttctcgtctgggagctggtcctggggacgctggagaagttcaagctcatccattctttagacacattaactgggaagaacttctggctcgaaaggtggagcccccctttaaacctctgttgcaatctgaagaggatgtaagtcagtttgattccaagtttacacgtcagacacctgtcgacagcccagatgactcaactctcagtgaaagtgccaatcaggtctttctgggttttacatatgtggctccatctgtacttgaaagtgtgaaagaaaagttttcctttgaaccaaaaatccgatcacctcgaagatttattggcagcccacgaacacctgtcagcccagtcaaattttctcctggggatttctggggaagaggtgcttcggccagcacagcaaatcctcagacacctgtggaatacccaatggaaacaagtggcatagagcagatggatgtgacaatgagtggggaagcatcggcaccacttccaatacgacagccgaactctgggccatacaaaaaacaagcttttcccatgatctccaaacggccagagcacctgcgtatgaatctatgacagagcaatgcttttaatgaatttaaggcaaaaaggtggagagggagatgtgtgagcatcctgcaaggtgaaacaagactcaaaatgacagtttcagagagtcaatgtcattacatagaacacttcggacacaggaaaaataaacgtggattttaaaaaatcaatcaatggtgcaaaaaaaaacttaaagcaaaatagtattgctgaactcttaggcacatcaattaattgattcctcgcgacatctttctcaaccttatcaaggattttcatgttgatgactcgaaactgacagtattaagggtaggatgttgctctgaatcactgtgagtctgatgtgtgaagaagggtatcctttcattaggcaagtacaaattgcctataatacttgcaactaaggacaaattagcatgcaagcttggtcaaacttttcccaggcaaaatgggaaggcaaagacaaaagaaacttaccaattgatgttttacgtgcaaacaacctgaatcttttttttatataaatatatatttttcaaatagatttttgattcagctcattatgaaaaacatcccaaactttaaaatgcgaaattattggttggtgtgaagaaagccagacaacttctgtttcttctcttggtgaaataataaaatgcaaatgaatcattgttaacacagctgtggctcgtttgagggattggggtggacctggggtttattttcagtaacccagctgcggagcct

SEQ ID NO: 1138 - DNA, 1936 bp, Homo sapiens
cctcgctagtggcgggcatgataacacacgccggagggtcgcacgcgggttccagttgtgattgctggagttgtgtattgccaggaggctctccgagattggggtcgggtcactgcctcatccaccggagcgatggcgtttctccgaagcatgtggggcgtgctgagtgccctgggaaggtctggagcagagctgtgcaccggctgtggaagtcgactgcgctcccccttcagttttgtgtatttaccgaggtggttttcatctgtcttggcaagttgtccaaagaaacctgtaagttcttaccttcgattttctaaagaacaactacccatatttaaagctcagaacccagatgcaaaaactacagaactaattagaagaattgcccagcgttggagggaacttcctgattcaaagaaaaaaatatatcaagatgcttatagggcggagtggcaggtatataaagaagagataagcagatttaaagaacagctaactccaagtcagattatgtctttggaaaaagaaatcatggacaaacatttaaaaaggaaagctatgacaaaaaaaaaagagttaacactgcttggaaaaccaaaaagacctcgttcagcttataacgtttatgtagctgaaagattccaagaagctaagggtgattcaccgcaggaaaagctgaagactgtaaaggaaaactggaaaaatctgtctgactctgaaaaggaattatatattcagcatgctaaagaggacgaaactcgttatcataatgaaatgaagtcttgggaagaacaaatgattgaagttggacgaaaggatcttctacgtcgcacaataaagaaacaacgaaaatatggtgctgaggagtgttaaaagtagaagattgagatgtgttcacaatggataggcacaggaaaccagttaggtctcaatacctgaagctatcgtaaaattaagaaaggataaagttggtaaaccttttatatttagtatctttttattcagctcatggacttctgccagcataatacttgctttggaaaacccagataaaggttcatgcaaactttattttgtgtttaggaactactgaggatcagagtaatccaagcaaatgtgaatcattttacctttgacaaaggtaaatcagactatgaagttttttttatacaggatgatgactatggaaagagtactcttgtttccttatattatggaggcaggagtttcgttttcaaaattgttacaaattgtagaagccacggtgttctgtgatataagtgtgtgtttttcataaagcaggcagaactcatctaggtaaattacagttcctaggtataattcacattgtattcagagttgatggttgtacatataagtgattgctggttttagttgcaactttgtataaaagggactgagaaatttataaacttttttcttactgtcttttttctaaagtaaaaacaaagaaattatgtgccagatttatgcatattattttatgttgcatagaataaaatttttaatctttaattttacatttcctaaatatattttaagacgaaacatttgttctatagcttttccctttttttaagtaaggaattttatttttttctgaattattttctctcgtgagtatattgatccagaaagaaaacttgtattatgtgtgttttaaaatgagaaatctaaaaaacgaaaagtctccaaagtctctggaatttgaaacactttgcataacgtataaaagcctgtttaagagacagccaactatggcctgtggatcaaatccagcctgctgcctgctttttatggcctgtgagctaggaattgtgtttataattttaaatgtttttttttaaagacttttatgatacttgaaaattaacatgaatatttagtgttcataaataaagtttgttgaaacaca

SEQ ID NO: 1139 - DNA, 1764 bp, Homo sapiens; identical to SEQ ID NO: 698

SEQ ID NO: 1140 - DNA, 865 bp, Homo sapiens
gaattccggagttccgggcgcgcgcgacgtcagtttgagttctgtgttctccccgcccgtgtcccgcccgacccgcgcccgcgatgctggcgctgcgctgcggctcccgctggctcggcctgctctccgtcccgcgctccgtgccgctgcgcctccccgcggcccgcgcctgcagcaagggctccggcgacccgtcctcttcctcctcctccgggaacccgctcgtgtacctggacgtggacgccaacgggaagccgctcggccgcgtggtgctggagctgaaggcagatgtcgtcccaaagacagctgagaacttcagagccctgtgcactggtgagaagggcttcggctacaaaggctccaccttccacagggtgatcccttccttcatgtgccaggcgggcgacttcaccaaccacaatggcacaggcgggaagtccatctacggaagccgctttcctgacgagaactttacactgaagcacgtggggccaggtgtcctgtccatggctaatgctggtcctaacaccaacggctcccagttcttcatctgcaccataaagacagactggttggatggcaagcatgttgtgttcggtcacgtcaaagagggcatggacgtcgtgaagaaaatagaatctttcggctctaagagtgggaggacatccaagaagattgtcatcacagactgtggccagttgagctaatctgtggccagggtgctggcatggtggcagctgcaaatgtccatgcacccaggtggccgcgttgggctgtcagccaaggtgcctgaaacgatacgtgtgcccactccactgtcacagtgtgcctgaggaaggctgctagggatgttagacggaattcc

SEQ ID NO: 1141 - DNA, 1332 bp, Homo sapiens
cggactagacctggtcagacacaatgttggcactcttggttctggtgactgtggccctggcatctgctcatcatggtggtgagcactttgaaggcgagaaggtgttccgtgttaacgttgaagatgaaaatcacattaacataatccgcgagttggccagcacgacccagattgacttctggaagccagattctgtcacacaaatcaaacctcacagtacagttgacttccgtgttaaagcagaagatactgtcactgtggagaatgttctaaagcagaatgaactacaatacaaggtactgataagcaacctgagaaatgtggtggaggctcagtttgatagccgggttcgtgcaacaggacacagttatgagaagtacaacaagtgggaaacgatagaggcttggactcaacaagtcgccactgagaatccagccctcatctctcgcagtgttatcggaaccacatttgagggacgcgctatttacctcctgaaggttggcaaagctggacaaaataagcctgccattttcatggactgtggtttccatgccagagagtggatttctcctgcattctgccagtggtttgtaagagaggctgttcgtacctatggacgtgagatccaagtgacagagcttctcgacaagttagacttttatgtcctgcctgtgctcaatattgatggctacatctacacctggaccaagagccgattttggagaaagactcgctccacccatactggatctagcattggcacagaccccaacagaaattttgatgctggttggtgtgaaattggagcctctcgaaacccctgtgatgaaacttactgtggacctgccgcagagtctgaaaaggagaccaaggccctggctgatttcatccgcaacaaactctcttccatcaaggcatatctgacaatccactcgtactcccaaatgatgatctacccttactcatatgcttacaaactcggtgagaacaatgctgagttgaatgccctggctaaagctactgtgaaagaacttgcctcactgcacggcaccaagtacacatatggcccgggagctacaacaatctatcctgctgctgggggctctgacgactgggcttatgaccaaggaatcagatattccttcacctttgaacttcgagatacaggcagatatggctttctccttccagaatcccagatccgggctacctgcgaggagaccttcctggcaatcaagtatgttgccagctacgtcctggaacacctgtactagttgagaaagctgatggccttgtttcaaaattctcatttttcatttcttttctttcttg

SEQ ID NO: 1142 - DNA, 890 bp, Homo sapiens
ggcggaccgaagaacgcaggaagggggccggggggacccgcccccggccggccgcagccatgaactccaacgtggagaacctacccccgcacatcatccgcctggtgtacaaggaggtgacgacactgaccgcagacccacccgatggcatcaaggtctttcccaacgaggaggacctcaccgacctccaggtcaccatcgagggccctgaggggaccccatatgctggaggtctgttccgcatgaaactcctgctggggaaggacttccctgcctccccacccaagggctacttcctgaccaagatcttccacccgaacgtgggcgccaatggcgagatctgcgtcaacgtgctcaagagggactggacggctgagctgggcatccgacacgtactgctgaccatcaagtgcctgctgatccaccctaaccccgagtctgcactcaacgaggaggcgggccgcctgctcttggagaactacgaggagtatgcggctcgggcccgtctgctcacagagatccacgggggcgccggcgggcccagcggcagggccgaagccggtcgggccctggccagtggcactgaagcttcctccaccgaccctggggccccagggggcccgggaggggctgagggtcccatggccaagaagcatgctggcgagcgcgataagaagctggcggccaagaaaaagacggacaagaagcgggcgctgcgggcgctgcggcggctgtagtgggctctcttcctccttccaccgtgaccccaacctctcctgtcccctccctccaactctgtctctaagttatttaaattatggctggggtcggggagggtacagggggcactgggacctggatttgtttttctaaataaagttggaaaagca

SEQ ID NO: 1143 - DNA, 2838 bp, Homo sapiens; identical to SEQ ID NO: 700

SEQ ID NO: 1144 - DNA, 1717 bp, Homo sapiens
cgcctaccgtctccttcaaggcactttcttagacacccgggcaccaggcagatgcaccccccaacacacccaccccaagcaagtcacaaatcagcctgctccaactgtcttatggggagggtgtgagagaggtgcccaaaggcccctaaaaggtgagcctctcctctctccccacaggggtgaatgtgatgctgaggaagattgctgtggctgcagcgtccaagccagcagtggagatcaaacaggagggagacactttctacatcaaaacctccaccaccgtgcgcaccacagagattaacttcaaggttggggaggagtttgaggagcagactgtggatgggaggccctgtaaggtgagtgccagaaggggctccagggtcatggcgtcattgccctgcctctcaacctgccattttccaggctagcagttaactcctagcttctctctgtcccagtagggaaaatccctaggtagtggtgggggctagaaaggggctctctcccttatccctctcactgcattgcccctgctatgggcccagctcacttggccacctgtctcttgcagagcctggtgaaatgggagagtgagaataaaatggtctgtgagcagaagctcctgaagggagagggccccaagacctcgtggaccagagaactgaccaacgatggggaactgatcctggtaagtcctgcctcctccccactaatagcaaacccagtgctaccttccaagattctctgggagaccccagggtgcaggagactcaagaacaaccatggctggactccgcaccctgctgatgggactgcttgaacagaactaaggtgtccctatcccatacagtgccctgtgtgaattagaaatggtgttccttttatgcaagcaaagggcatgtactgagggatcccagcagttcttcagggagatcttcctggcttgaggaggaggacgggccccagggctctattgctatcctccctccattgatgcctgggcattctgggaccagctcctgcctgttggtcttgagccaagaagcaggtttggacctggaggccaagcagagtacctccattcaaccctcctctccaaagccacaggaccccaggggcctctcaggctaacaactacttctgtccttccagaccatgacggcggatgacgttgtgtgcaccagggtctacgtccgagagtgagtggccacaggtagaaccgcggccgaagcccaccactggccatgctcaccgccctgcttcactgccccctccgtcccaccccctccttctaggatagcgctccccttaccccagtcacttctgggggtcactgggatgcctcttgcagggtcttgctttctttgacctcttctctcctcccctacaccaacaaagaggaatggctgcaagagcccagatcacccattccgggttcactccccgcctccccaagtcagcagtcctagccccaaaccagcccagagcagggtctctctaaaggggacttgagggcctgagcaggaaagactggccctctagcttctaccctttgtccctgtagcctatacagtttagaatatttatttgttaattttattaaaatgctttaaaaaaataaaacctgtctctggctcattgggcaggtagataagtcacctgagttcaaccttgcctctgaaatgtagtatgggaaagacttgtgtttctgcagcat

SEQ ID NO: 1145 - DNA, 2798 bp, Homo sapiens
cgttgctgtcgctctgcacgcacctatgtggaaactaaagcccagagagaaagtctgacttgccccacagccagtgagtgactgcagcagcaccagaatctggtctgtttcctgtttggctcttctaccactacggcttgggatctcgggcatggtggctttgccaatggtccttgttttgctgctggtcctgagcagaggtgagagtgaattggacgccaagatcccatccacaggggatgccacagaatggcggaatcctcacctgtccatgctggggtcctgccagccagccccctcctgccagaagtgcatcctctcacaccccagctgtgcatggtgcaagcaactgaacttcaccgcgtcgggagaggcggaggcgcggcgctgcgcccgacgagaggagctgctggctcgaggctgcccgctggaggagctggaggagccccgcggccagcaggaggtgctgcaggaccagccgctcagccagggcgcccgcggagagggtgccacccagctggcgccgcagcgggtccgggtcacgctgcggcctggggagccccagcagctccaggtccgcttccttcgtgctgagggatacccggtggacctgtactaccttatggacctgagctactccatgaaggacgacctggaacgcgtgcgccagctcgggcacgctctgctggtccggctgcaggaagtcacccattctgtgcgcattggttttggttcctttgtggacaaaacggtgctgccctttgtgagcacagtaccctccaaactgcgccacccctgccccacccggctggagcgctgccagtcaccattcagctttcaccatgtgctgtccctgacgggggacgcacaagccttcgagcgggaggtggggcgccagagtgtgtccggcaatctggactcgcctgaaggtggcttcgatgccattctgcaggctgcactctgccaggagcagattggctggagaaatgtgtcccggctgctggtgttcacttcagacgacacattccatacagctggggacgggaagttgggcggcattttcatgcccagtgatgggcactgccacttggacagcaatggcctctacagtcgcagcacagagtttgactacccttctgtgggtcaggtagcccaggccctctctgcagcaaatatccagcccatctttgctgtcaccagtgccgcactgcctgtctaccaggagctgagtaaactgattcctaagtctgcagttggggagctgagtgaggactccagcaacgtggtacagctcatcatggatgcttataatagcctgtcttccaccgtgacccttgaacactcttcactccctcctggggtccacatttcttacgaatcccagtgtgagggtcctgagaagagggagggtaaggctgaggatcgaggacagtgcaaccacgtccgaatcaaccagacggtgactttctgggtttctctccaagccacccactgcctcccagagccccatctcctgaggctccgggcccttggcttctcagaggagctgattgtggagttgcacacgctgtgtgactgtaattgcagtgacacccagccccaggctccccactgcagtgatggccagggacacctacaatgtggtgtatgcagctgtgcccctggccgcctaggtcggctctgtgagtgctctgtggcagagctgtcctccccagacctggaatctgggtgccgggctcccaatggcacagggcccctgtgcagtggaaagggtcactgtcaatgtggacgctgcagctgcagtggacagagctctgggcatctgtgcgagtgtgacgatgccagctgtgagcgacatgagggcatcctctgcggaggctttggtcgctgccaatgtggagtatgtcactgtcatgccaaccgcacgggcagagcatgcgaatgcagtggggacatggacagttgcatcagtcccgagggagggctctgcagtgggcatggacgctgcaaatgcaaccgctgccagtgcttggacggctactatggtgctctatgcgaccaatgcccaggctgcaagacaccatgcgagagacaccgggactgtgcagagtgtggggccttcaggactggcccactggccaccaactgcagtacagcttgtgcccataccaatgtgaccctggccttggcccctatcttggatgatggctggtgcaaagagcggaccctggacaaccagctgttcttcttcttggtggaggatgacgccagaggcacggtcgtgctcagagtgagaccccaagaaaagggagcagaccacacgcaggccattgtgctgggctgcgtagggggcatcgtggcagtggggctggggctggtcctggcttaccggctctcggtggaaatctatgaccgccgggaatacagtcgctttgagaaggagcagcaacaactcaactggaagcaggacagtaatcctctctacaaaagtgccatcacgaccaccatcaatcctcgctttcaagaggcagacagtcccactctctgaaggagggagggacacttacccaaggctcttctccttggaggacagtgggaactggagggtgagaggaagggtgggtctgtaagaccttggtaggggactaattcactggcgaggtgcggccaccaccctacttcattttcagagtgacacccaagagggctgcttcccatgcctgcaaccttgcatccatctgggctaccccacccaagtatacaataaagtcttacctcagaaaaaaaaaaaaaaaaaa

SEQ ID NO: 1146 - DNA, 5670 bp, Homo sapiens
cagtaaagagctgatcatggttctcactccttgaataccaggaacaccatctcgtatcacataatgagacagggagacattctggtcctcatctcacagatgaaaaatgtcaagcttcgaaggatcaaagtgcccacctagtcacacgggtagtcagccacaggtcagcctgccttatttattcttcatgagtatttatagtgactaacatttactgggcgcctactgtgggccatttctgtgcatgtgacaacccctttaagtccttgtttctaatcccaagaagcaaggaaatggggtcagggaagggacaaggtttgcccaagtccaggcagggggagaggtcaagctcagaaccatcacctgcccatgacacatgcccaggactcaggttccctaggcttccttccaaaggctcagcagtgacgagccagcccttgaaccagcctcttcccccacccaagcagccacctctcaggggaattgtggccaccacaggtgcagggagcagtttctctccactcacagcctgaagcatacccggcaggggctgtccccaggcccaacaagcaaagggcccagtagcgagggccactggagcccatctccggggggctgggcaggaagtagggtggggtttggggtagggatctggtaccctgggactgctgcaactcaaactaaccaacccactgggagaagatgcctgggggtccaggagtcctccaagctctgcctgccaccatcttcctcctcttcctgctgtctgctgtctacctgggtatgtggccaaagggcaggaactggcgggaggtgggggaagctgtggaggctgcagagagggcacaggcagagggaagggggctcagggaaaggggaagaggaggcagaggataggggacccagggaagatgcctatagaaatcgtatctgtgccaagatgggccaaggtggggctggagggagcccagcagaggagaaggggcgtccacagtctcacacagggaggcaggagcaagagtcacctcccccacctcctgttccccacaggccaaaataaggaactaaagttgctcttgactgagcaccagggctgggggcaggaaggggacttaggggtagcagcattcagcgtctgtcaaggggagaaaaagctttctctgccttaaacctcaggtgcctctctctgttgggagtcccttctcagcactgggggaatgggtgtctcatggactccccctcacctgctcaaggacagctggcaggggctgtggcacgctaacccaggagttcagagaaaaaggttccccacccaagggacactgggagcaaggattggagttcacgtctgagtcttaagcccgtgacgatgagggtgctcggcccctctccccatctcttcctccttctctcttcctcacctccctcctccacctacctccagaagaggggactggccatgtgggaggcctggctgagagctggggcttcccagaggagcccggattggacactgcagccagcctgagccgcctcgtctcactcagagacacccccagtctccaccccgctctgagccccttcaatcaccagcagcccagcccaaggactgaactcacccctgacccctaggttgacacatacaacttacagagaatgagggccaggcacagggtcacaggccagggcaggccacagactggctcctcagcccaggcagggagaggccagggagccaagagtttgaacccagtgccactcctgactgcctggtgatgctggcaacccgcctgccctcccagagcctcagccatccctcctgtaaaatggggctaaggagagaacctacttctagggttctgtgaatgattacacaagaaaaagcgccaggtgctgggcctggctgaggctggggtgcaaaaatggaccgggaaggctgcgggaggaggggacgcctgcactgcttctggaaggagctgtctggacagcgtcctccagtgcctggaacaaacatccaaaatccagagagttcacagggccagagtacaaagtgggtatgcgggagggggacaagagatggcgctgcagaggtgagaagggcctcccaggggtcttaccatcccagggagtctcattctcctctcccaggatatcctcacccaccccaaccaggtatgtcctctctccttcccaggggcttcttcactttcccgcatcccccctctccccaggatgtatcagcccctgtcaggggctctctctctccctccccacccaggagagtcctcaccctcttcccaggagtgctggaactgcaggggccagggctggggaaatgtgtcaccatccccagtccctgacccacccaccctgtctctccacaggccctgggtgccaggccctgtggatgcacaaggtcccagcatcattgatggtgagcctgggggaagacgcccacttccaatgcccgcacaatagcagcaacaacgccaacgtcacctggtggcgcgtcctccatggcaactacacgtggccccctgagttcttgggcccgggcgaggaccccaatggtacgctgatcatccagaatgtgaacaagagccatgggggcatatacgtgtgccgggtccaggagggcaacgagtcataccagcagtcctgcggcacctacctccgcgtgcgccgtgagtggcccagccctggcccctactcccactgtcccgctgggcactcggtttatctttgaagtggggatagagccagtaccttcaatgtgggtttcaaaccggcttggacagagggacggacattctcctctgcagagtggggtctctggggggtctggggccttgcaggaggtgggcggggcaggaggctagggagggcaagaggggccagggctctgagcatactacctccttgcagagccgccccccaggcccttcctggacatgggggagggcaccaagaaccgaatcatcacagccgaggggatcatcctcctgttctgcgcggtggtgcctgggacgctgctgctgttcagggtgagccccctcggacctctgagtcagccgggcgagggctgggcgagggacccccaatacccaggtagccctctagagcctgaggttccccatccaaaacttgggagaatgaaagcacccaccatataggggctgtgggagttaaatgaatgaatataaagaagggacttgaactggcgctgagccagggggtgtcttcaatttagtttccccttctggctgtcctcacgtccacctccccccaagaagagtctcattcttctccctaagagtgtcctcactcccctcctgccctcacccaggagtgtggttaccctccaggtgtagccaagaccagggaaggtggggcctggtcctcccagaatctctgatctgtaccagcctctccttaggcactacagaaagtgtgactgttattgttattattcatggagaatagtaagggagtggagactcaagaagacgctagcttgggaggccgaggcaagaggatcacttgaggccacaagtttgagaccagcctgggcaacacagcaagaccctatctctacacacacaaagtcttaaaaaaaaattagccaggcatggtggcacacacctatagtcccagctactcaggaggctgaggtgggaggattgcttgagcccaggagttcaaggctgcagtgaaatatgatgttgccacagcacttccagcctgggcaactgagggagaagaaagagagagagagagaaagagagagagagagagagagagagagagagggccagagggagggagggaaggaagggaagggaagggaaggaaggaaggaaggaaggaaggaaggaaggaaggaaggaaggaaggagaacactggttgtagactcagagagaactgttacataaccagtatgtggccttggggacatctcttaccctttctggaaaagtacttcctggcatccaggagggtctgaaagatattcacctccccctgctcactgaggcacccaccccacccacccctacagaaacgatggcagaacgagaagctcgggttggatgccggggatgaatatgaagatgaaaacctttatgaagtgagtgaagggtggggatggggtaggggcagttgtgttaggggtgggggtgttcctctgggggtggctgggggcagggaccccaggtgtcagggtgctgatgttcgctgcctcatttccatcccagggcctgaacctggacgactgctccatgtatgaggacatctcccggggcctccagggcacctaccaggatgtgggcagcctcaacataggagatgtccagctggagaagccgtgacacccctactcctgccaggctgcccccgcctgctgtgcacccagctccagtgtctcagctcacttccctgggacattctcctttcagcccttctgggggcttccttagtcatattcccccagtggggggtgggagggtaacctcactcttctccaggccaggcctccttggactcccctgggggtgtcccactcttcttccctctaaactgccccacctcctaacctaatccccacgccccgctgcctttcccaggctcccctcacccagcgggtaatgagcccttaatcgctgcctctaggggagctgattgtagcagcctcgttagtgtcaccccctcctccctgatctgtcagggccacttagtgataataaattcttcccaactgcagaccttggcaggagtcgtggatcttacggaaaccgcctctcccacatgtccctcagacccaggagtcccagcccaagccactccctgcccactccccacacctgggaccaggtagccagtctgggctgccctcctgggagaacaagatgtctcttgggaaggtccccagaccaactgaaggactggtttggccctctttgcagggctcaccctagggtcatatccttaagcaagaagggggacaagatcaagatggctgtggctaccaaattacttacactttttttttttttttttttttttgagacagagtctcactctgttgcccaggttggagtgctcactgcaacctctgcctcctgggttcaagcgattctcctgcctcagcctcccaagtagctgggattacaggcgcctgccaccatgcccagctaatttttgtatttttagtagaggcggggtttcaccatgttggccagactggtcttgaacctctgacctcaggtgatccacctaccttggcctcccaaagtgctgggattacaggcgcctgcaccacgcccggccgctttttttttttttttttttttttgaggcagagtctgactctgtcgcccaggctggagtgcagtggcgcaatctcagcccacttcaacctccacctcaagcgattcttgtacctcaggctcccgagtagctgggatgacaggcatgtgctaccacacccagctaatttttgttttagtagagacagggtttcgccatgttggccgggctggtctcgaactcctgacctcaagtgatccaccatgcttcggcctcccaaagtgctgggattacagcatgagccactttatgcgtatttaagccttggaaacacagggactatcttgtggattggggctagtaca

SEQ ID NO: 1147 - DNA, 1686 bp, Homo sapiens; identical to SEQ ID NO: 703

SEQ ID NO: 1148 - DNA, 2814 bp, Homo sapiens
aagaacgcccccaaaatctgtttctaattttacagaaatcttttgaaacttggcacggtattcaaaagtccgtggaaagaaaaaaaccttgtcctggcttcagcttccaactacaaagacagacttggtccttttcaacggttttcacagatccagtgacccacgctctgaagacagaattagctaactttcaaaaacatctggaaaaatgaagacttgggtaaaaatcgtatttggagttgccacctctgctgtgcttgccttattggtgatgtgcattgtcttacgcccttcaagagttcataactctgaagaaaatacaatgagagcactcacactgaaggatattttaaatggaacattttcttataaaacattttttccaaactggatttcaggacaagaatatcttcatcaatctgcagataacaatatagtactttataatattgaaacaggacaatcatataccattttgagtaatagaaccatgaaaagtgtgaatgcttcaaattacggcttatcacctgatcggcaatttgtatatctagaaagtgattattcaaagctttggagatactcttacacagcaacatattacatctatgaccttagcaatggagaatttgtaagaggaaatgagcttcctcgtccaattcagtatttatgctggtcgcctgttgggagtaaattagcatatgtctatcaaaacaatatctatttgaaacaaagaccaggagatccaccttttcaaataacatttaatggaagagaaaataaaatatttaatggaatcccagactgggtttatgaagaggaaatgcttcctacaaaatatgctctctggtggtctcctaatggaaaatttttggcatatgcggaatttaatgataaggatataccagttattgcctattcctattatggcgatgaacaatatcctagaacaataaatattccatacccaaaggctggagctaagaatcccgttgttcggatatttattatcgataccacttaccctgcgtatgtaggtccccaggaagtgcctgttccagcaatgatagcctcaagtgattattatttcagttggctcacgtgggttactgatgaacgagtatgtttgcagtggctaaaaagagtccagaatgtttcggtcctgtctatatgtgacttcagggaagactggcagacatgggattgtccaaagacccaggagcatatagaagaaagcagaactggatgggctggtggattctttgtttcaagaccagttttcagctatgatgccatttcgtactacaaaatatttagtgacaaggatggctacaaacatattcactatatcaaagacactgtggaaaatgctattcaaattacaagtggcaagtgggaggccataaatatattcagagtaacacaggattcactgttttattctagcaatgaatttgaagaataccctggaagaagaaacatctacagaattagcattggaagctatcctccaagcaagaagtgtgttacttgccatctaaggaaagaaaggtgccaatattacacagcaagtttcagcgactacgccaagtactatgcacttgtctgctacggcccaggcatccccatttccacccttcatgatggacgcactgatcaagaaattaaaatcctggaagaaaacaaggaattggaaaatgctttgaaaaatatccagctgcctaaagaggaaattaagaaacttgaagtagatgaaattactttatggtacaagatgattcttcctcctcaatttgacagatcaaagaagtatcccttgctaattcaagtgtatggtggtccctgcagtcagagtgtaaggtctgtatttgctgttaattggatatcttatcttgcaagtaaggaagggatggtcattgccttggtggatggtcgaggaacagctttccaaggtgacaaactcctctatgcagtgtatcgaaagctgggtgtttatgaagttgaagaccagattacagctgtcagaaaattcatagaaatgggtttcattgatgaaaaaagaatagccatatggggctggtcctatggaggatacgtttcatcactggcccttgcatctggaactggtcttttcaaatgtggtatagcagtggctccagtctccagctgggaatattacgcgtctgtctacacagagagattcatgggtctcccaacaaaggatgataatcttgagcactataagaattcaactgtgatggcaagagcagaatatttcagaaatgtagactatcttctcatccacggaacagcagatgataatgtgcactttcaaaactcagcacagattgctaaagctctggttaatgcacaagtggatttccaggcaatgtggtactctgaccagaaccacggcttatccggcctgtccacgaaccacttatacacccacatgacccacttcctaaagcagtgtttctctttgtcagactaaaaacgatgcagatgcaagcctgtatcagaatctgaaaaccttatataaacccctcagacagtttgcttattttattttttatgttgtaaaatgctagtataaacaaacaaattaatgttgttctaaaggctgttaaaaaaaagatgaggactcagaagttcaagctaaatattgtttacattttctggtactctgtgaaagaagagaaaagggagtcatgcattttgctttggacacagtgttttatcacctgttcatttgaagaaaaataataaagtcagaagttcaaaaaaaaaaaaaaaaaaaaaaaaagcggccgctcg

SEQ ID NO: 1149 - DNA, 1388 bp, Homo sapiens
gcggacttctgccaagcaccggctcatgtgaggctcgcggcacagcgttctctgggctccccagaagccagcctttcgctcccggacccggcagcccgagcaggagccgtgggaccgggcgccagcaccctctgcggcgtgtcatgggcccgcgccgccggagccgaaagcccgaggccccgaggaggcgcagcccgagcccgaccccgacccccggcccctcccggcggggcccctccttaggcgcttcctcccatcaacacagtcggcggagacaaggttggctaaaggagatccgaaagcttcagaagagcacacacctcttgataaggaagctgcccttcagccgcctggcaagagaaatatgtgttaaattcactcgtggtgtggacttcaattggcaagcccaggccctattggccctacaagaggcagcagaagcatttctagttcatctctttgaggacgcctatctcctcaccttacatgcaggccgagttactctcttcccaaaggatgtgcaactggcccggaggatccggggccttgaggagggactcggctgagctcctgcacccagtgtttctgtcagtctttcctgctcagccaggggggatgataccggggactctccagagccatgactagatccaatggattctgcgatgctgtctggactttgctgtctctgaacagtatgtgtgtgttgctttaaatatttttcttttttttgagaaggagaagactgcatgactttcctctgtaacagaggtaatatatgagacaatcaacaccgttccaaaggcctgaaaataattttcagataaagagactccaaggttgactttagtttgtgagttactcatgtgactatttgaggattttgaaaacatcagatttgctgtggtatgggagaaaaggttatgtacttattattttagctctttctgtaatatttacattttttaccatatgtacatttgtacttttattttacacataagggaaaaaataagaccactttgagcagttgcctggaaggctgggcatttccatcatatagacctctgcccttcagagtagcctcaccattagtggcagcatcatgtaactgagtggactgtgcttgtcaacggatgtgtagcttttcagaaacttaattggggatgaatagaaaacctgtaagctttgatgttctggttacttctagtaaattcctgtcaaaatcaattcagaaattctaacttggagaatttaacattttactcttgtaaatcatagaagatgtatcataacagttcagaattttaaagtacattttcgatgcttttatgggtatttttgtagtttctttgtagagagataataaaaatcaaaatatttaatga

SEQ ID NO: 1150 - DNA, 18648 bp, Homo sapiens
tcaagatcagcctgggcaacatggcgaaaccccgtctctacaataaatacaaaaaaattatcctggcggagttatgcacgttgtagtcccaactacctgggaggctgaggcgggagaatcacctgagcctgggaggtcgaggctgcagcgagccgagatcggccgctgcattccagcctgggtgacagagcgagaccatgtctcaaaaaataaaaattaaaaaaaaattgttttcattacctcagccctcctcttcctatcccaaggcgtcgaaattccggtcccaccccttcccatggagcccttggcgtctccaggctcctcaagctagtttcggttccgggctcacgcgcgggttctcgaaaatcagctgtttcagtcttgggctagtccactaattggactcctcccctcgtagaaagtgcctacttgaacttctccaccaatcgctgaagctgcaggtgtggtttcggctcagcttgtcccgccctggcggaggggcggagttgcggcggcgccagtgagctcgcagtctgggaagggcttgactgaatggcagccagtgtcggggtggcggctgggaatgggggccgctccggacttccgctgccaactacaagggggcgggtccgaggggggttagccgaagttgtaggcggggcgcgaggttctagtacccgagctcatactagggacgggaagtcgcgaccagagccattggagggcgcggggactgcaaccctaatcaggtacgggccctgagagggtgtgctggggtaggggtgggggtgagagtgagagttcctccgagggaagggcgactggcccaggggttaccccctggagagggtagcttccttccccagattgaaataggagctgtcgcctgctcggtcctcgatcttcttctgtccagcctatctccctaaccctaatgcccctctcccaaaactgccctgcagcttccgagacccggaatctggcattgttatgttggttcggtatctgacgtttttccctctgctctgcattattttttatcttcaccaaaaaacgatgttcaaagatagataaatctaaaaacaaagatagataaatctattacccttgtttcgtaaaaagtataagctactgaaagatgaaacgattgcctaaggtcacacacaaaattcagttcatttcagaaaagcttcttgagtgcaaaatatgtgcctaagaatgagagataatgagaaaaaattgtttcagccccttaacctcagtgtttgcaatccatttggggagaccaggttttttgtttttgttttcatatttgaatctttgctgacttgctcctttaatatcagacacttaaatcctcagatgggactcatcatattttttttgagatggaatcttcactatgttgctcaagcttggtctgcaactcctggctcaagccatcctctcgtcttgttgggcctctcgtcttgtgggcctgcacaaagtgctgggattacaggcatgagccattcatgccctgggcgcaccttggattgcgatgtgtgtgtgttgtgaagcttttttttttggtatcataaaagcaatacagatacatagttttaaaaatcaagcagctactaaaagagttaaaatgaaaatagcccctcccaatccctcccttgttcctgctggaggtagaaaggcagctgatgttattcatgttagtagaagactctcccaccccaagcatttctctttattttgtaataaaatcatgtgacctttttagaccacaaatatgcatgaattctgttctgttaggctcaggctgcaacaagataagtttcagtttcctaaatagacaccagctggcagtgagcagggaacagtggggagaaagatgcatgggacagcctgcttggtgacaggcaaaaaccggtttgttgttcttttagagacagagtcttgctttgtcacccaggctggagtgtagtgatgtgatctctgcttactgcaaccctgcctctgggtacaagccattctcctgcctcagcctcttgagtagctgggattacaggcaacaattttaagtgaagtgaagtttcaggatctcgagcaaagttgtataacctataatcatattcaagattcacaggtcataaacgtgtcatattcttgggattgagcgacccattgcacagcatttagatgtgcttctagaatggagctcctccttcctatatggagggcagtttatatggtgtacttacctgaccaccaaaaagatttggctctaaaaaagcttcaggtggccgggcatggtggttcacccctgtaatccagcactttgggaggcaggtgggcagatcacctgaggtcagaagttcagacagctggacatatggtgaaacctcatctctactaaaaatacaaaaattagactgggcatggtagtgggcgcctgtaatcccagctagtcgggaggctgaggcaggagaatcccttcaactcggacggcagagtttgcagtgaggccgagatcgtgtcactgcagtccagcctgggtgacagagcaagactccatctcaaaaaaagtaaaaaaaaaaaaaagaaaaaaaaaagcttcagagccagcagggatcatgctgtaataaatacttaacatcaacactgatctttaaatgctttagcacaatcaaatataaataacaaacacacacataaatgcaaaataaatgaattagggagatagatgaaataagattgtggaaatagtaatgtttgttaaagctggatggtgatccttgtactattcactctactctagtgtgtatttgaaaattaccattaggctggttatggtggctcatgcctgttaatcccggcattttggaaggctgaggcaggcggattacttgagctcaggagtttagagtctgcctgggcaacatggcaaaatcccatctctacaaaaaattagctggcatgatggcacactcctgtagtcccagctccttgaggggctgaggcagagaatggcttgaacctgagaggctaaagctgcagtgagccaagatcatgccactgcactccagcctgggtgaccaagtgagaccctgtctcaaaaaaaaaaaaaaaaaaaagaaaagaaaattcccattaaagcacaaaggcccacttattgaagctattaaaatacaggttggggccggctgggcatcgcgtcacgcctgtaatcccagcactttggaaggccgaggtaggcgagtcacgagttcaggagatcgagaccatcctggctaacacggtgaaaccccatctctactaaaaatacaaaaaaaaaaatcagccgggcatggtggcgggagcctatagtcccagctactcgggaggctgaggcaggagaatggcatgagcccgggaggcggagcttgcagtgagccaaaatcacaccactgcactccagcctgggcaacagatcgagactccatctgaagaaaaaaaaaatacaggttgggaccacagtggctcatgcctgtaatcctagtactttgggagtccgaagtaggtggatcacctgaggtcaggactttgagaccagcctggccaacatggcaaaaccccatctctactaaaaaatatacaaaaattagctgggcgtggtggtgggtgcctgtaatcccagctactcaggaggctgaggcagaagaatcacaacaaccagggggatggtggttgcaatgagccaagatcatctccacttcactccggcccaggcaaaagagtgagagtcatcttaaaaaaaaaaaaaaaaaaaaaaaaaaaatacagattaggcattcctaatctgaaaaatttggctccaaaatgctccagtcgagcatttcctttgagtgtcatgtgggtgctcaaaaagttagatttttggaccattttcagatttcagagttttggattagggatgctcgactggtaagtaatcgagatattccaaaaatctggacaaatctgaaatccaaaatgcttggaatagcagatactcaactggtagcactccctggaagaatatgcaccaaactgatagcagtggttaccttctggtgaggaggggaaagaaccaagattagcagtaggatcaacatatattttaatgttttctgtatttttattacttgtataatttaaacattttaaattagtaataatgaacaatcatgaaactatggatgatttagtccagcaaaatatccaattgggaaccctcatccttctgcagagcccaaatggcgcagtgggaaatgctgcagaatcttgacagcccctttcaggatcagctgcaccagctttactcgcacagcctcctgcctgtggacattcgacagtacttggctgtctggattgaagaccagaactggtgaggccttcaggaagttgggggaatgaaaaaggtggccttccacttctgggcccccgggatcctggaatcattaatggcaggaaggggttggaaagcctcaggactacagtaacactgcagagacactaatacttcttattcctggtcccaggcaggaagctgcacttgggagtgatgattccaaggctaccatgctattcttccacttcttggatcagctgaactatgagtgtggccgttgcagccaggacccagagtccttgttgctgcagcacaatttgcggaaattctgccgggacattcaggtacttggaacggttgggagtgatggggtagcactgggagcagagcatagaggagtaaggtttggagaatagaatagtacctggaggtggcaagggagacgggaacaaatgtggggaaaggaggacagagtctggacttggggaatcactagcagagagaagggttgcatatacgtgacactgttgggaggatgctatggtgaaaagacaaagggctaagaaccccgaaggaggaggaaatactgtggacattggtggggagggtctagggcaataggtcattgagagtggttgaattggatcaatcctttctgtttacctttctgttagcccttttcccaggatcctacccagttggctgagatgatctttaacctccttctggaagaaaaaagaattttgatccaggctcagagggcccaattggtgaggacaattcagtggtaatgttggaaactcctgaagtagagaggaaccatggaaaggactcagggagttgtctcagaacaggatccccccgacatcctgtggtataatttcaggcctgaacttaaggcatgaaaggccagagttaaaacgtgctcagagcctcttttttcaggaacaaggagagccagttctcgaaacacctgtggagagccagcaacatgagattgaatcccggatcctggatttaagggctatgatggaggttagtagatgtggtaggagttagggttgacagtgttcagcctaacacctccctgagaagcagcctcatcggggtcctctcccctctgcagaagctggtaaaatccatcagccaactgaaagaccagcaggatgtcttctgcttccgatataagatccaggccaaaggtaggaagcacattgaggggctggagaaagataagtgcctgctgagaagccggagctggaagtgaacaggagaaagctccgatgagcagtagtcactgtcagacacaccccactgactacagtcctgctgccgtgcaaagctggaatcgtgctttgtggaggctgagctggaggtgacagctgagagacagtaaattgttgaggaaatgcatggaaaactaacagtgttttatttgagggggtgtctggtccaagatgaccacttcagaatttgcctggagggtcccacaggtgcctgtgctttgcttggtttccctttcttcctccgccacaaaattcctccttcctgactctgactgagaccccagtcaggaaggagaggaaagaacccctggactgactcctgttcccaccatccagggaagacaccctctctggacccccatcagaccaaagagcagaagattctgcaggaaactctcaatgaactggacaaaaggagaaaggtgggaggcagcagaacagaacatgtgggcaacaaggacctgaaaaaatgagggatgttgggaaccctggtaatctagcgctggcttctttctttcttcatccccagttgggtggtggagggtgaaagggagagatgctcaacactcacattatctctttcccaggaggtgctggatgcctccaaagcactgctaggccgattaactaccctaatcgagctactgctgccaaagttggaggagtggaaggcccagcagcaaaaagcctgcatcagagctcccattgaccacgggttggaacagctggagacatggtgagaggtaccaccccaaccctcgtcctcgccatgcgctgtgatttgtaagttgcagtgccctgcatatagcaagagatactgttctctatttgtctctgctccccagaatagagccctgctccctgcctgactgcagctctattctgcctcctcagcctcaccacgcagggaagcccagaagtcccagtctccttcagggaaaggaatgaattaacccacaatctggttttgcttcttttttttaatcacccagaaatatatatatatgtattttttttttactgcaacgaatacaatgacaagaaaggaagggaaggaaggaaggaagagaaaattacctattacctagcttattaaacaaaaatggaatcatattgtccatactattttgaaatccatggggttttttttaagcttaacagtattttatatatatatatatatatatatatatatatatatatatatatatatatatattttttttttttttttttttttttttttttgagacggagtctctctctgttccctggctggcggagcggagtcggcacgatctcagctcactgcaacttccaactcccacggttcaagccaattctcctgtctcagcctcccgagcctgggattaccaggcacacaccagcctggctagtttttttgattttttagtagagacgatgtttctccatgttggccaggctggtctcaaactcctgacttcaggtgatccacccaacttgggctcccaaagtgctgggattacaggcgtgacgaccatgcccggccaacagtatattatatttatccatgttatttcttatgtccacacaacagtcccctatatggtggtaacataatttaattaatgaactcctattttcagctatttaggttattttcaatttcttgttaccttttgccaggaaacgtatattttatggtaattatattgtgttgtagaaaaatcactagtctagtccaacttgcttgaaaaatagctactttttaactattttctcatttaaaaatttattataatttagtcttttagaaatataccaggccaggcatggcgtctcatgcctgttatcctagtactttggaaggctgaggacggaggatcacttcagtcttggggtttgagaccagcccgggaaacataacaagaccccatctctacaaaaaaaaaaaattgtttttaattaggcatgtccgacacagtggctcacacatgtggccagcactgtgggaaggccaaggtgggtggatcacttgagggtcaggagttcaagaccagcctggccaatgtggtgaaaccccatctctactaaaaatacaaaaatttgccaggtgtggtggcgcatgcctgtattcccagctactcaggaggctaaggcaggaaatcacttgaactcggaggcagaggttgcagtgagctgtgacaatgccactgtactccagcctgggtgacagagcgagctccgtctcaaaaaaaaaaaaaaaagattaggcatggtggcacacgcctgtagaccctagctactcaggaggctgaggtgggaggattgcttgagcccaggtgttggaggctgcagtgagccatgattataccactgtagtccagcctggacaacagaacgagaccctgtctctaaaagtatatatgtacacataccataatacccagctactgaggaggctgaggcagaaagagtgcttgagtccaggagtttgatgtcagcctgagcaatatagcaagaccctcacctcttaaaaaaatttaaagtagattaaaaaaataccacaattgctcaggtagattaaaaaaataccacaattgctcaggtagattattgaaaaacaggcatatagtacttatggtacaggaccagcatgcatgcatgcatgcattgattgattgattgattgattgattgagacagggtctctctctgtctcccaggctggagtgcctggccttaagtgatctgcccacctttgcttcccaaagtgctgagattacaggtgtgagccaccatgtcagctggcgaggctttttaaaagatagttccaagtgttacagctcttttaggatttgtctagcaggctttcaggtttttgccagaaaccacccccacccccaccaaaaaaaaaaaaaaaaaaaagatatgtacaagttcccagatagtgttcccaactgaatctatttctcatgtgtagtgtatggttgttttcctgtcaccacattgctgattattattatttttaattatagagacagtaaagtacagtagttaaaaatgtgagttggggctgggtgcagtggctcacacctgtaatcccagcactttgggaggccaaggtgggcggatcacctgaggtcaggagttcaagaccagcttggccaacatggcaaaaccccgtctcgactaaaaatatatatatataagttagccgggcgtggtggcaacattacctgtaatcccagctactcgggaggccaacaggcaggagaatctcttgaatccaggaggtggaggttgcagtgagccagatcacaccattgcactccagcctggatgacaagagagtgagactgtctaaaaaaaaaaaacaaagtgtgagttgtacaatgagactgcctgggatcacatacaagcttcatcccttactagttgtattgaccctaaagcaagtcactaacctttctgtgccctccagttttatcatctgtaatgtggggaaaataatagtacctgcctcagagggttgttttgaggattaaatgcattaatatgtggaaagggcttaatataagttgtacatagcatatgaaaactgttatgttaaatctattagcagttttatatgtgaaaatagctttgattttcatttcttggattatgaatcatgttgaataatcctttatatgcttcctggattctttttttttcttccccccagtcagtttctgactcttctcatatttatagagagatcttggaacctggatgggggaatccaggaaactcatggattccttcttcctgaattttatcacccaggttcacagctggagcaaagctgttgtttcacctgaggcagctgctgaaggagctgaagggactgagttgcctggttagctatcaggatgaccctctgaccaaaggggtggacctacgcaacgcccaggtcacagagttgctacagcgtctgctccacaggtctagaggccaggcaggaaccctgggggaaagaaggaacaagggaagccattcttacacatactgagctatatattctctccacacctctctctcctcgagcctttgtggtagaaacccagccctgcatgccccaaactccccatcgacccctcatcctcaagactggcagcaagttcaccgtccgaacaaggttggcattccagaactcattcccacttcctttttccaaccctgccactgtgtattttctggctttacagctactgcccactcttggctttttcagtctttcctgaatctccctacctcgttgataccccatcgtcctctttttcaaacacctagcctatacaaaagccgactccgaccacatttccctataccccttgacttccccaggctgctggtgagactccaggaaggcaatgagtcactgactgtggaagtctccattgacaggtaaattggagcaggtgaagggtggccaggacacgggctgctggggtggaggagatactcactcttcacaacagggccctagggctatatccttcctccttccaatcctacctcacagaaattataattcatttcttttgttgaacacttactttgtgacatgcagcatgtcagctactcatttaattgtcacaccaaccccatgaataaactattaccagtgcactgtacaaacaaagatacaggcttagagagactgattacatctcttctcaaggccacatagctagtgagctcaagtcgggtttgaaccgaggtctgtctgatcccaaagacgaaactcctaacttccatactcttttgcccaatgattttttttaaatttatttcttttcaggaatcctcctcaattacaagggtaggtgcttgacaaggacactgcaaacatctgtacagtgtatgacctgcagaaccgggggatttgggaaatggacaaagggagatggcgagatctgaaatggaagtggaacttcagttttttttttttctgctgagtttttacaataattccattccttgtctccatgtatcttcctcctggaacagcttccggaagttcaacattctgacttcaaaccagaaaactttgacccccgagaaggggcagagtcagggtttgatttgggactttggttacctggtaagaatagtttgtgacctatgcttttattactatttttattttttcgagacggagtctcactctgtcccccaggctggagtgcagtggtgccatcttggctcacaggaacctccgccctccccggttcaagcaattcttctgtctcagcctcctgagtacgtagagctataggcagcacaccaccatgcccggctaatttttgtatttttagtagagatagggtttcaccatattggtcgggctggtctcgaactcctgacctcaggtgatccgacccgcctcagcctcccaaagtgctgggatcacaggcatgagccaccatagctggcctgcttttagtccaaaggaacaggggttgggggaagttcccagggcttgagaggtcttgaagccaaacaggggttccagggagactagggtgcccactctggcattttctctccttcccttcaattcacagactctggtggagcaacgttcaggtggttcaggaaagggcagcaataaggtgagatctggacagaggactcgaggcagggggagcttgccaaagagccttctgatgactatgtctttgcctgtcccagaggggccactaggtgtgacagaggaactgcacatcatcagcttcacggtcaaatatacctaccagggtctgaagcaggagctgaaagtgagtgaaaatggagggcaaggagagagaaagcagctttggaagaaggcataagaaggggataaacagaagcctcttggggagggttagcactcctttcctctaacaaatacctgcagctagaaacatcacatccctctctgtgactcctgtcttctccccacacacggacaccctccctgtggtgattatttccaacatgaaccagctctcaattgcctgggcttcagttctctggttcaatttgctcagcccaaaccttcaggtaggggagtggggccgacaggtcccggcgcgagagcaggggtgtggaagcttggtgtgataggttgcttctgagccagcctacactgctcccacccctgcagaaccagcagttcttctccaacccccccaaggccccctggagcttgctgggccctgctctcagttggcagttctcctcctatgttggccgaggcctcaactcagaccagctgagcatgctgagaaacaagctgttcggtacagatttccttttctctcagcctttccccagccttagtcttttctgtccctctgtcctatctatcccaggacccctggcttccctcacatatctgtggctatctgtcccacagggcagaactgtaggactgaggatccattattgtcctgggctgacttcactaaggtaactccctgaatcctgtggagctgctggatctagccccacattccaaatactggccttcccacgtgccctccttccctacaccagaggcaactcctcagcttttgctacctttccattcctccagcgagagagccctcctggcaagttaccattctggacatggctggacaaaattctggagttggtacatgaccacctgaaggatctctggaatgatgggtaaggccttggtcacccttccctcatgggcttgtgcttccgggcttgagagtggagtctctgcaccctcacgtggcaagcagggagagagagcaaagcacggtgcaggccacgtctcctcacatttgttaagaataataaggccgggtgtggtggctcacacctgtaatcccagcactttgggaggccgaggcgggcggatcatgaggtcaggagatcgagaccatcctggctaacacggtgaaaccccgtctctactctaaaaatacaaaaaattagccgggcgtggaggcagacaccctgtagtcccagctactcaggaggctgaggcaggaaaatggcgtgaacctgggagatggagcttgcagtgagccgagattgcgtcactgccctccagccttggggtgacgtagcaagactccgtctcaaaaaaaaaaaaaaaaaacaaccaataatagccataaacagtgtttttgtgaagcactcctacattccagagcttgatgggtgctcttcattaattctctcatctcatccttacaaccatgctgagtggtgggttttgccagcttcatttcatgtgaggaaactgagtttcagagaagttaaagaacttacccaagggacacagttgatattcaaatccaggcctatgtgactccaagcccatgctctttccaccacactgcctaccaacttgtgtagcatttggcttttaaaagtgctattcatgaccaggcacgatggctcacgccttgtaatcccagcattttgggaggccgaggtgggtggatcacctgaggtcaggagtttgagaccagcctggccaacatggcgaaaccccatctctattaaaaatacaaaaattagccgggtgtggtggtgggcgcctgtaatcccagctactcaggaggctgaggaggagaatcgcttgaatttaggagagaaggttacagtgagccaagatcgtgccattgcactccagcctgggtgacagagcaagactctgtctcaaaacaaaaccaaaaaaaagtgctatttgtggccaggcgtggttgctcatgcctgtaatcctagcatttttggggaggctgaggagtacagatcacttgagcccaggagttcaaaactaccctgggccacgtggtgaaaccccaaaccccgtctctacgaaaaatacaaaagttagccaggatgggtggtgtgcacctgtggtcccagctactctggaggctgagaggtggggaagattgcttgagcccgggaggtcgaggtggcagtgagctgtgatcatgccactattctccagcctgggtgacagaatacaccctgtctccctgtctcccagaaaaaaaaaaaagtgctgttcatctgtgtgatctcactgaatcttcgtacttcaaaccctcggaaggtggctattgtcagcaaagtgaagtgacttgtaaaagataaaaaaaagctaagtggcagggcttggtccaaagcctggattccaaacctgggctgtttctccatacaaggggagcagggaggcaggggcctgggggggcagggtgttgggcggtgtcacacgtgacacactgtgctccagacgcatcatgggctttgtgagtcggagccaggagcgccggctgctgaagaagaccatgtctggcacctttctactgcgcttcagtgaatcgtcagaagggggcattacctgctcctgggtggagcaccaggatgatggtagctgctctgccctgccattcccacagcctctcctttctgcctggctctcctctggcccctctgcctgccttgcttcgctggctctgaactgaatgctcagtggtttgggactgggcagccagagagtcagagagctccaaggcccggcctcttccctcaagcccgcctgttcctgcattcactctccagacaaggtgctcatctactctgtgcaaccgtacacgaaggaggtgctgcagtcactcccgctgactgaaatcatccgccattaccagttgctcactgaggagaatatacctgaaaacccactgcgcttcctctatccccgaatcccccgggatgaagcttttgggtgctactaccaggagaaaggtgggaatcgttgacatacttcattgctagattgcagagatctaccagacatccatagatcccactccttcctttaaagcatgggaaaactgatatctagaggaattaagggattcgtccatgggatactgctggttactatggggatgagactgccaggaccatctgcactaggggaaaacctcaggctatatgtctggcccactgatcttctctgcttcttgtatatgttcctcacagttaatctccaggaacggaggaaatacctgaaacacaggctcattgtggtctctaatagagtgagatatgaactgttcattcatcctccctaatccttattggctctgcttcagtgaatcgtcaaaagggggcattaccttctcctgggtggagcaccaggatgatggtcagctgctctgccctgccattcccacagcctctcctttctgccttctcctaagctgcccctattccagtctccccagccttccctccctcctagccccactctagttttttctggttctagtctctcctatctcatatttttctgctgccatccttaggttgtctccacaggggtttctggataataatgatcataatcactggtgttaaggggtacctacttgatgcaagcatggagctttttttttttccagacagggttttgttctgtcgcccaggctggagtgcagtggtgtgatcctggctcactgcagcctcgacctcctgagctcaagcaatacaggcatgcatcaccaaactcagctaattttttttgtattttttgtagagatggggtcttaccatgttgacgcatcaggctgttctgaactcctggactcaagcaatccacccaccttggcctcccaaaagtcagggattacaggcgtgcgaccacaccccgcatatatatatttttttttttttttttttttttttttttttgagacagggtctctgttatccaggctggagttgcagtggataatatgactacgagccttgacctaggggttgaagcaatgctcctgcctcagccaccaagtgctgagactacaggcacacgccaatctacactcaatcacactcagctaattttttaaattttttgtagggatggggtatcactgtgtttgcccaggctggtcttgaactcctggcctcaagcagtctcctgccttggcctcccaaattgccgggattgtaggaatgagccatggcacttggctgggggatagaattttttttttttttttttttttttttttttttgagacagtctcactctcattgcccgggctggagtgcagtggtgcaatttcagctcactgcaacctctgcctcccaggctcaagcaattctcctgcctcagcctatagagtagctgggattacaggcgagcgccacccatgcctggttaatttttgttttttttttgagacagagtctcgccctgttgcccaggctggagtgcagtggcacgatctcagctcactgcaacctctgcctcccaggctcaagcaattctcctgcctcagcctcctgagtactgggactacaagcgcgcacaaccaccacacctggtaatttttgtatttttagtagagacagggttttaccatattggccaggctggtctcaaactcctgacctcatgatccgacccaccttggcctcccaaagtgcagggattacaggcgtgagcctctgcacccggcctaacttttgtatttttagtagaaacagggtttcaccatgttggccaggctggtcatgagctcctggcctcaagtgatctgcccgcctcagcctcccaaagtgcttggattacaggtgtgagccacctggcctgagagtttattatgcgccaggcactaggcaaatggtttgcatttattttctcattttattgaatctacaaaatagtcctgtgaagtaaacactgttactgttttcagctaaggaactggatttagagtagtcaagttttgtacctaaggtacgtggctaatgatacaggtctgttagattccgtagccctgattttaaccaccctactgcctctcaagaattactaggtattgttctcatttatagatgataaatctgaggctcagaaaagttaggccacttgcctaaggtcccccagccaggattcaaactccaggaggcctgattccaaacccatgctctttagccctccgccctactgccttcttagactagcttctgcttattctaccattcctgatttcatttgaaccactgagccctgcccctttgtctgtctttgggtatccaggcaggtggatgaactgcaacaaccgctggagcttaagccagagccagagctggagtcattagagctggaactagggctggtgccagagccagagctcagcctggacttagagccactgctgaaggcagggctggatctggggccagagctagagtctgtgctggagtccactctggagcctgtgatagagcccacactatgcatggtatcacaaacagtgccagagccagaccaaggacctgtatcacagccagtgccagagccagatttgccctgtgatctgagacatttgaacactgagccaatggaaagtaagtgatgagatggagtggcacacattccctttcctacctcttctccctctcccattacagaaaaagctgaactccaagctcctcattggagagaggtccatctgtgattcctttttttaggaattacacatgccttcccccacctccctgctctttcatcccacaagttcccactcaggctcttcccaggcctttcctgccatcctccctcccttgggctgctgggttgggaactcctaactaagatcggggcctcacttttctctctggattacctagtcttcagaaactgtgtaaagattgaagaaatcatgccgaatggtgacccactgttggctggccagaacaccgtggatgaggtttacgtctcccgccccagccacttctacactgatggacccttgatgccttctgacttctaggaaccacatttcctctgttcttttcatatctctttgcccttcctactcctcatagcatgatattgttctccaaggatgggaatcaggcatgtgtcccttccaagctgtgttaactgttcaaactcaggcctgtgtgactccattggggtgagaggtgaaagcataacatgggtacagaggggacaacaatgaatcagaacagatgctgagccataggtctaaataggatcctggaggctgcctgctgtgctgggaggtataggggtcctgggggcaggccagggcagttgacaggtacttggagggctcagggcagtggcttctttccagtatggaaggatttcaacattttaatagttggttaggctaaactggtgcatactggcattggccttggtggggagcacagacacaggataggactccatttctttcttccattccttcatgtctaggataacttgctttcttctttcctttactcctggctcaagccctgaatttcttcttttcctgcaggggttgagagctttctgccttagcctaccatgtgaaactctaccctgaagaaagggatggataggaagtagacctctttttcttaccagtctcctcccctactctgccccctaagctggctgtacctgttcctcccccataaaatgatcctgccaatctaatgtgagtgtgaagtttgcacactagtttatgctacctagtctccactttctcaatgcttaggagacagatcactcctggaggctggggatggtaggattgctggggatttttttttttttaaagagggtctcactctgttgcccaggctagagtgcaatggtgcaatcacagctcactgcagcctcaacctcctgggttcaagcaatcctcctacctcagcctcctgggtagctagcaccatggcatcgccaccatgccctattttttttttttaaagacagggtcttgctatattgcccaggctggtcttgaactgggctcaagtgatcctcacgccttgcctcccaaagtgctgggattataggcatgagccactgtgcttggccaggatttttttttttttttttttgagatggagtttctctcttgttgtccaggctggagtgcaatggtgtgatccggggaattc

SEQ ID NO: 1151 - DNA, 1008 bp, Homo sapiens
ctgtcctctctgacaccaccccggcctgcctctttgttgccatgagagctgcctacctcttcctgctattcctgcctgcaggcttgctggctcagggccagtatgatctggacccgctgccgccgttccctgaccacgtccagtacacccactatagcgaccagatcgacaacccagactactatgattatcaagaggtgactcctcggccctccgaggaacagttccagttccagtcccagcagcaagtccaacaggaagtcatcccagccccaaccccagaaccaggaaatgcagagctggagcccacagagcctgggcctcttgactgccgtgaggaacagtacccgtgcacccgcctctactccatacacaggccttgcaaacagtgtctcaacgaggtctgcttctacagcctccgccgtgtgtacgtcattaacaaggagatctgtgttcgtacagtgtgtgcccacgaggagctcctccgagctgacctctgtcgggacaagttctccaaatgtggcgtgatggccagcagcggcctgtgccaatccgtggcggcctcctgtgccaggagctgtgggagctgctagggtggtgctggcatcctgagtcctggccctcctgggatctggggccctcgggctacctgacctggtgcttttttccccatccccatgttccttttattctgaaaaagttagtggactgcagccctgggggttgcaggctgcggtgcctcaggcccctccttcagcctgtggccacctctggggcacgatgggggctccccactgcccagtctgcccctcgggttgggggagtatcccaggcctctctgtgggacctgggcctgacgggcccttctcagcccgttttgaggacagacagtcccccgaggtaggctacatccccccaccccagctggtctgcttggatttcctacagcccccgtgggcatggaccacctttattttatacaaaattaaaaacaagtttttacaaaaa

SEQ ID NO: 1152 - DNA, 1017 bp, Homo sapiens; identical to SEQ ID NO: 704

SEQ ID NO: 1153 - DNA, 10211 bp, Homo sapiens
gagaggtcgttttcccgtccccgagagcaagtttatttacaaatgttggagtaataaagaaggcagaacaaaatgagctgggctttggaagaatggaaagaagggctgcctacaagagctcttcagaaaattcaagagcttgaaggacagcttgacaaactgaagaaggaaaagcagcaaaggcagtttcagcttgacagtctcgaggctgcgcctcagaagcaaacacagaaggttgaaaatgaaaaaaccgagggtacaaacctgaaaagggagaatcaaagattgatggaaatatgtgaaagtctggagaaaactaagcagaagatttctcatgaacttcaagtcaaggagtcacaagtgaatttccaggaaggacaactgaattcaggcaaaaaacaaatagaaaaactggaacaggaacttaaaaggtgtaaatctgagcttgaaagaagccaacaagctgcgcagtctgcagatgtctctctgaatccatgcaatacaccacaaaaaatttttacaactccactaacaccaagtcaatattatagtggttccaagtatgaagatctaaaagaaaaatataataaagaggttgaagaacgaaaaagattagaggcagaggttaaagccttgcaggctaaaaaagcaagccagactcttccacaagccaccatgaatcaccgcgacattgcccggcatcaggcttcatcatctgtgttctcatggcagcaagagaagaccccaagtcatctttcatctaattctcaaagaactccaattaggagagatttctctgcatcttacttttctggggaacaagaggtgactccaagtcgatcaactttgcaaatagggaaaagagatgctaatagcagtttctttgacaattctagcagtcctcatcttttggatcaattaaaagcgcagaatcaagagctaagaaacaagattaatgagttggaactacgcctgcaaggacatgaaaaagaaatgaaaggccaagtgaataagtttcaagaactccaactccaactggagaaagcaaaagtggaattaattgaaaaagagaaagttttgaacaaatgtagggatgaactagtgagaacaacagcacaatacgaccaggcgtcaaccaagtatactgcattggaacaaaaactgaaaaaattgacggaagatttgagttgtcagcgacaaaatgcagaaagtgccagatgttctctggaacagaaaattaaggaaaaagaaaaggagtttcaagaggagctctcccgtcaacagcgttctttccaaacactggaccaggagtgcatccagatgaaggccagactcacccaggagttacagcaagccaagaatatgcacaacgtcctgcaggctgaactggataaactcacatcagtaaagcaacagctagaaaacaatttggaagagtttaagcaaaagttgtgcagagctgaacaggcgttccaggcgagtcagatcaaggagaatgagctgaggagaagcatggaggaaatgaagaaggaaaacaacctccttaagagtcactctgagcaaaaggccagagaagtctgccacctggaggcagaactcaagaacatcaaacagtgtttaaatcagagccagaattttgcagaagaaatgaaagcgaagaatacctctcaggaaaccatgttaagagatcttcaagaaaaaataaatcagcaagaaaactccttgactttagaaaaactgaagcttgctgtggctgatctggaaaagcagcgagattgttctcaagaccttttgaagaaaagagaacatcacattgaacaacttaatgataagttaagcaagacagagaaagagtccaaagccttgctgagtgctttagagttaaaaaagaaagaatatgaattgaaagaagagaaaactctgttttcttgttggaaaagtgaaaacgaaaaacttttaactcagatggaatcagaaaaggaaaacttgcagagtaaaattaatcacttggaaacttgtctgaagacacagcaaataaaaagtcatgaatacaacgagagagtaagaacgctggagatggacagagaaaacctaagtgtcgagatcagaaaccttcacaacgtgttagacagtaagtcagtggaggtagagacccagaaactagcttatatggagctacagcagaaagctgagttctcagatcagaaacatcagaaggaaatagaaaatatgtgtttgaagacttctcagcttactgggcaagttgaagatctagaacacaagcttcagttactgtcaaatgaaataatggacaaagaccggtgttaccaagacttgcatgccgaatatgagagcctcagggatctgctaaaatccaaagatgcttctctggtgacaaatgaagatcatcagagaagtcttttggcttttgatcagcagcctgccatgcatcattcctttgcaaatataattggagaacaaggaagcatgccttcagagaggagtgaatgtcgtttagaagcagaccaaagtccgaaaaattctgccatcctacaaaatagagttgattcacttgaattttcattagagtctcaaaaacagatgaactcagacctgcaaaagcagtgtgaagagttggtgcaaatcaaaggagaaatagaagaaaatctcatgaaagcagaacagatgcatcaaagttttgtggctgaaacaagtcagcgcattagtaagttacaggaagacacttctgctcaccagaatgttgttgctgaaaccttaagtgcccttgagaacaaggaaaaagagctgcaacttttaaatgataaggtagaaactgagcaggcagagattcaagaattaaaaaagagcaaccatctacttgaagactctctaaaggagctacaacttttatccgaaaccctaagcttggagaagaaagaaatgagttccatcatttctctaaataaaagggaaattgaagagctgacccaagagaatgggactcttaaggaaattaatgcatccttaaatcaagagaagatgaacttaatccagaaaagtgagagttttgcaaactatatagatgaaagggagaaaagcatttcagagttatctgatcagtacaagcaagaaaaacttattttactacaaagatgtgaagaaaccggaaatgcatatgaggatcttagtcaaaaatacaaagcagcacaggaaaagaattctaaattagaatgcttgctaaatgaatgcactagtctttgtgaaaataggaaaaatgagttggaacagctaaaggaagcatttgcaaaggaacaccaagaattcttaacaaaattagcatttgctgaagaaagaaatcagaatctgatgctagagttggagacagtgcagcaagctctgagatctgagatgacagataaccaaaacaattctaagagcgaggctggtggtttaaagcaagaaatcatgactttaaaggaagaacaaaacaaaatgcaaaaggaagttaatgacttattacaagagaatgaacagctgatgaaggtaatgaagactaaacatgaatgtcaaaatctagaatcagaaccaattaggaactctgtgaaagaaagagagagtgagagaaatcaatgtaattttaaacctcagatggatcttgaagttaaagaaatttctctagatagttataatgcgcagttggtgcaattagaagctatgctaagaaataaggaattaaaacttcaggaaagtgagaaggagaaggagtgcctgcagcatgaattacagacaattagaggagatcttgaaaccagcaatttgcaagacatgcagtcacaagaaattagtggccttaaagactgtgaaatagatgcggaagaaaagtatatttcagggcctcatgagttgtcaacaagtcaaaacgacaatgcacaccttcagtgctctctgcaaacaacaatgaacaagctgaatgagctagagaaaatatgtgaaatactgcaggctgaaaagtatgaactcgtaactgagctgaatgattcaaggtcagaatgtatcacagcaactaggaaaatggcagaagaggtagggaaactactaaatgaagttaaaatattaaatgatgacagtggtcttctccatggtgagttagtggaagacataccaggaggtgaatttggtgaacaaccaaatgaacagcaccctgtgtctttggctccattggacgagagtaattcctacgagcacttgacattgtcagacaaagaagttcaaatgcactttgccgaattgcaagagaaattcttatctttacaaagtgaacacaaaattttacatgatcagcactgtcagatgagctctaaaatgtcagagctgcagacctatgttgactcattaaaggccgaaaatttggtcttgtcaacgaatctgagaaactttcaaggtgacttggtgaaggagatgcagctgggcttggaggaggggctcgttccatccctgtcatcctcttgtgtgcctgacagctctagtcttagcagtttgggagactcctccttttacagagctcttttagaacagacaggagatatgtctcttttgagtaatttagaaggggctgtttcagcaaaccagtgcagtgtagatgaagtattttgcagcagtctgcaggaggagaatctgaccaggaaagaaaccccttcggccccagcgaagggtgttgaagagcttgagtccctctgtgaggtgtaccggcagtccctcgagaagctagaagagaaaatggaaagtcaagggattatgaaaaataaggaaattcaagagctcgagcagttattaagttctgaaaggcaagagcttgactgccttaggaagcagtatttgtcagaaaatgaacagtggcaacagaagctgacaagcgtgactctggagatggagtccaagttggcggcagaaaagaaacagacggaacaactgtcacttgagctggaagtagcacgactccagctacaaggtctggacttaagttctcggtctttgcttggcatcgacacagaagatgctattcaaggccgaaatgagagctgtgacatatcaaaagaacatacttcagaaactacagaaagaacaccaaagcatgatgttcatcagatttgtgataaagatgctcagcaggacctcaatctagacattgagaaaataactgagactggtgcattgaaacccacaggagagtgctctggggaacagtccccagataccaattatgagcctccaggggaagataaaacccagggctcttcagaatgcatttctgaattgtcattttctggtcctaatgctttggtacctatggatttcctggggaatcaggaagatatccataatcttcaactgcgggtaaaagagacatcaaatgagaatttgagattacttcatgtgatagaggaccgtgacagaaaagttgaaagtttgctaaatgaaatgaaagaattagactcaaaactccatttacaggaggtacaactaatgaccaaaattgaagcatgcatagaattggaaaaaatagttggggaacttaagaaagaaaactcagatttaagtgaaaaattggaatatttttcttgtgatcaccaggagttactccagagagtagaaacttctgaaggcctcaattctgatttagaaatgcatgcagataaatcatcacgtgaagatattggagataatgtggccaaggtgaatgacagctggaaggagagatttcttgatgtggaaaatgagctgagtaggatcagatcggagaaagctagcattgagcatgaagccctctacctggaggctgacttagaggtagttcaaacagagaagctatgtttagaaaaagacaatgaaaataagcagaaggttattgtctgccttgaagaagaactctcagtggtcacaagtgagagaaaccagcttcgtggagaattagatactatgtcaaaaaaaaccacggcactggatcagttgtctgaaaaaatgaaggagaaaacacaagagcttgagtctcatcaaagtgagtgtctccattgcattcaggtggcagaggcagaggtgaaggaaaagacggaactccttcagactttgtcctctgatgtgagtgagctgttaaaagacaaaactcatctccaggaaaagctgcagagtttggaaaaggactcacaggcactgtctttgacaaaatgtgagctggaaaaccaaattgcacaactgaataaagagaaagaattgcttgtcaaggaatctgaaagcctgcaggccagactgagtgaatcagattatgaaaagctgaatgtctccaaggccttggaggccgcactggtggagaaaggtgagttcgcattgaggctgagctcaacacaggaggaagtgcatcagctgagaagaggcatcgagaaactgagagttcgcattgaggccgatgaaaagaagcagctgcacatcgcagagaaactgaaagaacgcgagcgggagaatgattcacttaaggataaagttgagaaccttgaaagggaattgcagatgtcagaagaaaaccaggagctagtgattcttgatgccgagaattccaaagcagaagtagagactctaaaaacacaaatagaagagatggccagaagcctgaaagtttttgaattagaccttgtcacgttaaggtctgaaaaagaaaatctgacaaaacaaatacaagaaaaacaaggtcagttgtcagaactagacaagttactctcttcatttaaaagtctgttagaagaaaaggagcaagcagagatacagatcaaagaagaatctaaaactgcagtggagatgcttcagaatcagttaaaggagctaaatgaggcagtagcagccttgtgtggtgaccaagaaattatgaaggccacagaacagagtctagacccaccaatagaggaagagcatcagctgagaaatagcattgaaaagctgagagcccgcctagaagctgatgaaaagaagcagctctgtgtcttacaacaactgaaggaaagtgagcatcatgcagatttacttaagggtagagtggagaaccttgaaagagagctagagatagccaggacaaaccaagagcatgcagctcttgaggcagagaattccaaaggagaggtagagaccctaaaagcaaaaatagaagggatgacccaaagtctgagaggtctggaattagatgttgttactataaggtcagaaaaagaaaatctgacaaatgaattacaaaaagagcaagagcgaatatctgaattagaaataataaattcatcatttgaaaatattttgcaagaaaaagagcaagagaaagtacagatgaaagaaaaatcaagcactgccatggagatgcttcaaacacaattaaaagagctcaatgagagagtggcagccctgcataatgaccaagaagcctgtaaggccaaagagcagaatcttagtagtcaagtagagtgtcttgaacttgagaaggctcagttgctacaaggccttgatgaggccaaaaataattatattgttttgcaatcttcagtgaatggcctcattcaagaagtagaagatggcaagcagaaactggagaagaaggatgaagaaatcagtagactgaaaaatcaaattcaagaccaagagcagcttgtctctaaactgtcccaggtggaaggagagcaccaactttggaaggagcaaaacttagaactgagaaatctgacagtggaattggagcagaagatccaagtgctacaatccaaaaatgcctctttgcaggacacattagaagtgctgcagagttcttacaagaatctagagaatgagcttgaattgacaaaaatggacaaaatgtcctttgttgaaaaagtaaacaaaatgactgcaaaggaaactgagctgcagagggaaatgcatgagatggcacagaaaacagcagagctgcaagaagaactcagtggagagaaaaataggctagctggagagttgcagttactgttggaagaaataaagagcagcaaagatcaattgaaggagctcacactagaaaatagtgaattgaagaagagcctagattgcatgcacaaagaccaggtggaaaaggaagggaaagtgagagaggaaatagctgaatatcagctacggcttcatgaagctgaaaagaaacaccaggctttgcttttggacacaaacaaacagtatgaagtagaaatccagacataccgagagaaattgacttctaaagaagaatgtctcagttcacagaagctggagatagaccttttaaagtctagtaaagaagagctcaataattcattgaaagctactactcagattttggaagaattgaagaaaaccaagatggacaatctaaaatatgtaaatcagttgaagaaggaaaatgaacgtgcccaggggaaaatgaagttgttgatcaaatcctgtaaacagctggaagaggaaaaggagatactgcagaaagaactctctcaacttcaagctgcacaggagaagcagaaaacaggtactgttatggataccaaggtcgatgaattaacaactgagatcaaagaactgaaagaaactcttgaagaaaaaaccaaggaggcagatgaatacttggataagtactgttccttgcttataagccatgaaaagttagagaaagctaaagagatgttagagacacaagtggcccatctgtgttcacagcaatctaaacaagattcccgagggtctcctttgctaggtccagttgttccaggaccatctccaatcccttctgttactgaaaagaggttatcatctggccaaaataaagcttcaggcaagaggcaaagatccagtggaatatgggagaatggtggaggaccaacacctgctaccccagagagcttttctaaaaaaagcaagaaagcagtcatgagtggtattcaccctgcagaagacacggaaggtactgagtttgagccagagggacttccagaagttgtaaagaaagggtttgctgacatcccgacaggaaagactagcccatatatcctgcgaagaacaaccatggcaactcggaccagcccccgcctggctgcacagaagttagcgctatccccactgagtctcggcaaagaaaatcttgcagagtcctccaaaccaacagctggtggcagcagatcacaaaaggtcaaagttgctcagcggagcccagtagattcaggcaccatcctccgagaacccaccacgaaatccgtcccagtcaataatcttcctgagagaagtccgactgacagccccagagagggcctgagggtcaagcgaggccgacttgtccccagccccaaagctggactggagtccaagggcagtgagaactgtaaggtccagtgaaggcactttgtgtgtcagtacccctgggaggtgccagtcattgaatagataaggctgtgcctacaggacttctctttagtcagggcatgctttattagtgaggagaaaacaattccttagaagtcttaaatatattgtactctttagatctcccatgtgtaggtattgaaaaagtttggaagcactgatcacctgttagcattgccattcctctactgcaatgtaaatagtataaagctatgtatataaagctttttggtaatatgttacaattaaaatgacaagcactatatcacaatctctgtttgtatgtgggttttacactaaaaaaatgcaaaacacattttattcttctaattaacagctcctaggaaaatgtagacttttgctttatgatattctatctgtagtatgaggcatggaatagttttgtatcgggaatttctcagagctgagtaaaatgaaggaaaagcatgttatgtgtttttaaggaaaatgtgcacacatatacatgtaggagtgtttatctttctcttacaatctgttttagacatctttgcttatgaaacctgtacatatgtgtgtgtgggtatgtgtttatttccagtgagggctgcaggcttcctagaggtgtgctataccatgcgtctgtcgttgtgcttttttctgtttttagaccaattttttacagttctttggtaagcattgtcgtatctggtgatggattaacatatagcctttgttttctaataaaatagtcgccttcgttttctgtaaaaaaaaaaaaaaaaaaaaaa

SEQ ID NO: 1154 - DNA, 670 bp, Homo sapiens
ggcacgagctcatctgacgactgacagctgatggcaccgccagcctctgtcccttggccaggactgtcacacggctgactctcagcaggggcagtagaatgaaagagggcatgtctaataacagcaccactagcatctcccaagccaggaaagctgtggagcagctaaagatggaagcctgtatggacagggtcaaggtctcccaggcagccgcggacctcctggcctactgtgaagctcacgtgcgggaagatcctctcatcattccagtgcctgcatcagaaaacccctttcgcgagaagaagttcttttgtaccattctctaactccgtgtgtgatgaaaacgcctccttttctgaccttcaaagtcccctgtagagaccatgcatgctctaagccttagggagtgagaccaacacccatccctgcccagccaacagtggccggggcttgtcttatgtttccatctgttttcttcgtggcattcaatttcatttttttccttttcattttcatgttattttcattattggcaaagaaaatcaaaatgtttatagccaaataacaaatgtgccatgtaaaagtaagtctggacttaagagtttaaaatttttaaacatcagtttccaagtttatatcatattaatacatttcagtggataatttattt

SEQ ID NO: 1155 - DNA, 2516 bp, Homo sapiens; identical to SEQ ID NO: 76

SEQ ID NO: 1156 - DNA, 1125 bp, Homo sapiens; identical to SEQ ID NO: 709

SEQ ID NO: 1157 - DNA, 2600 bp, Homo sapiens
aggcagtggagccccggcggcggcggcggcggcgcgcgggggcgacgcgcgggaacaacgcgagtcggcgcgcgggacgaagaataatcatgggccagactgggaagaaatctgagaagggaccagtttgttggcggaagcgtgtaaaatcagagtacatgcgactgagacagctcaagaggttcagacgagctgatgaagtaaagagtatgtttagttccaatcgtcagaaaattttggaaagaacggaaatcttaaaccaagaatggaaacagcgaaggatacagcctgtgcacatcctgacttctgtgagctcattgcgcgggactagggagtgttcggtgaccagtgacttggattttccaacacaagtcatcccattaaagactctgaatgcagttgcttcagtacccataatgtattcttggtctcccctacagcagaattttatggtggaagatgaaactgttttacataacattccttatatgggagatgaagttttagatcaggatggtactttcattgaagaactaataaaaaattatgatgggaaagtacacggggatagagaatgtgggtttataaatgatgaaatttttgtggagttggtgaatgcccttggtcaatataatgatgatgacgatgatgatgatggagacgatcctgaagaaagagaagaaaagcagaaagatctggaggatcaccgagatgataaagaaagccgcccacctcggaaatttccttctgataaaatttttgaagccatttcctcaatgtttccagataagggcacagcagaagaactaaaggaaaaatataaagaactcaccgaacagcagctcccaggcgcacttcctcctgaatgtacccccaacatagatggaccaaatgctaaatctgttcagagagagcaaagcttacactcctttcatacgcttttctgtaggcgatgttttaaatatgactgcttcctacatccttttcatgcaacacccaacacttataagcggaagaacacagaaacagctctagacaacaaaccttgtggaccacagtgttaccagcatttggagggagcaaaggagtttgctgctgctctcaccgctgagcggataaagaccccaccaaaacgtccaggaggccgcagaagaggacggcttcccaataacagtagcaggcccagcacccccaccattaatgtgctggaatcaaaggatacagacagtgatagggaagcagggactgaaacggggggagagaacaatgataaagaagaagaagagaagaaagatgaaacttcgagctcctctgaagcaaattctcggtgtcaaacaccaataaagatgaagccaaatattgaacctcctgagaatgtggagtggagtggtgctgaagcctcaatgtttagagtcctcattggcacttactatgacaatttctgtgccattgctaggttaattgggaccaaaacatgtagacaggtgtatgagtttagagtcaaagaatctagcatcatagctccagctcccgctgaggatgtggatactcctccaaggaaaaagaagaggaaacaccggttgtgggctgcacactgcagaaagatacagctgaaaaaggacggctcctctaaccatgtttacaactatcaaccctgtgatcatccacggcagccttgtgacagttcgtgcccttgtgtgatagcacaaaatttttgtgaaaagttttgtcaatgtagttcagagtgtcaaaaccgctttccgggatgccgctgcaaagcacagtgcaacaccaagcagtgcccgtgctacctggctgtccgagagtgtgaccctgacctctgtcttacttgtggagccgctgaccattgggacagtaaaaatgtgtcctgcaagaactgcagtattcagcggggctccaaaaagcatctattgctggcaccatctgacgtggcaggctgggggatttttatcaaagatcctgtgcagaaaaatgaattcatctcagaatactgtggagagattatttctcaagatgaagctgacagaagagggaaagtgtatgataaatacatgtgcagctttctgttcaacttgaacaatgattttgtggtggatgcaacccgcaagggtaacaaaattcgttttgcaaatcattcggtaaatccaaactgctatgcaaaagttatgatggttaacggtgatcacaggataggtatttttgccaagagagccatccagactggcgaagagctgttttttgattacagatacagccaggctgatgccctgaagtatgtcggcatcgaaagagaaatggaaatcccttgacatctgctacctcctccccctcctctgaaacagctgccttagcttcaggaacctcgagtactgtgggcaatttagaaaaagaacatgcagtttgaaattctgaatttgcaaagtactgtaagaataatttatagtaatgagtttaaaaatcaactttttattgccttctcaccagctgcaaagtgttttgtaccagtgaatttttgcaataatgcagtatggtacatttttcaactttgaataaagaatacttgaacttgtcaaaaaaaa

SEQ ID NO: 1158 - DNA, 2740 bp, Homo sapiens; identical to SEQ ID NO: 77

SEQ ID NO: 1159 - DNA, 2327 bp, Homo sapiens
aaatggtagaactagtgatctcacccagcctcactgtaaacagcgattgtctggataaactgaagtttaaccgtgctgacgctgctgtgtggactctgagtgacagacaaggcatcaccaaatcggcccccctgagagtgtcccagctcttctccagatcttgcccacgtgtcctcccccgccagccttccacagccatggcagcctacggccagacgcagtacagtgcggggatccagcaggctaccccctatacagcttacccacctccagcacaagcctatggaatcccttcctacagcatcaagacagaagacagcttgaaccattcccctggccagagtggattcctcagctatggctccagcttcagcacctcacccactggacagagcccatacacctaccagatgcacggcacaacagggttctatcaaggaggaaatggactgggcaacgcagccggtttcgggagtgtgcaccaggactatccttcctaccccggcttcccccagagccagtacccccagtattacggctcatcctacaaccctccctacgtcccggccagcagcatctgcccttcacccctctccacgtccacctacgtcctccaggaggcatctcacaacgtccccaaccagagttccgagtcacttgctggtgaatacaacacacacaatggaccttccacaccagcgaaagagggagacacagacaggccgcaccgggcctccgatgggaagctccgaggccggtctaagaggagcagtgacccgtccccggcaggggacaatgagattgagcgtgtgttcgtgtgggacttggatgagacaataattatttttcactccttactcacggggacatttgcatccagatacgggaaggacaccacgacgtccgtgcgcattggccttatgatggaagagatgatcttcaaccttgcagatacacatctgttcttcaatgacctggaggattgtgaccagatccacgttgatgacgtctcatcagatgacaatggccaagatttaagcacatacaacttctccgctgacggcttccacagttcggccccaggagccaacctgtgcctgggctctggcgtgcacggcggcgtggactggatgaggaagctggccttccgctaccggcgggtgaaggagatgtacaatacctacaagaacaacgttggtgggttgataggcactcccaaaagggagacctggctacagctccgagctgagctggaagctctcacagacctctggctgacccactccctgaaggcactaaacctcatcaactcccggcccaactgtgtcaatgtgctggtcaccaccactcaactaattcctgccctggccaaagtcctgctatatggcctggggtctgtgtttcctattgagaacatctacagtgcaaccaagacagggaaggagagctgcttcgagaggataatgcagagattcggcagaaaagctgtctacgtggtgatcggtgatggtgtggaagaggagcaaggagcgaaaaagcacaacatgcctttctggcggatatcctgccacgcgaacctggaggcactgaggcacgccctggagctggagtatttatagcaggatcagcagcatctccacctgccatctcaccctcagaccccctcgccttccccacctccccaccgagaactccagagacccagatgttggacaccaggaaggggccccacagccgagacgactgtccagtgaccatctcagaagccgtccatcagtccaaatgggggttctgagaaggaaagtacccaacattggcttcggagtatttgactttggggaaaagggctggctcggagtctagactcttctgtaagactcacagaacaaaagcaaggaattgctgatttggggggtgcctggtgatgaggaggggatgggtttgtcttgtcttctttttaatttatggactagtctcattactccggaattatgctcttgtacctgtgtggctgggtttcttagtcgttggtttggtttggttttttgaactggtatgtggggtggttcacagttctaatgtaagcactctattctccaagttgtgctttgtggggacaatcattctttgaacattagagaggaaggcagttcaagctgttgaaaagactattgcttatttttgtttttaaagacctacctgacgtcatgtggacagtgcacgtgccttacgctacatcttgttttctaggaagagggggatgctgggaaggaatgggtgctttgtgatggataaaaggcattaaataaaaccacgtttacattttg

SEQ ID NO: 1160 - DNA, 545 bp, Homo sapiens
atggccctgctactggccctcagcctgctggttctctggacttccccagccccaactctgagtggcaccaatgatgctgaagactgctgcctgtctgtgacccagaaacccatccctgggtacatcgtgaggaacttccactaccttctcatcaaggatggctgcagggtgcctgctgtagtgttcaccacactgaggggccgccagctctgtgcacccccagaccagccctgggtagaacgcatcatccagagactgcagaggacctcagccaagatgaagcgccgcagcagttaacctatgaccgtgcagagggagcccggagtccgagtcaagcattgtgaattattacctaacctggggaaccgaggaccagaaggaaggaccaggcttccagctcctctgcaccagacctgaccagccaggacagggcctggggtgtgtgtgagtgtgagtgtgagcgagagggtgagtgtggtctagagtaaagctgctccacccccagattgcaatgctaccaataaagccgcctggtgtttacaact

SEQ ID NO: 1161 - DNA, 1669 bp, Homo sapiens
ggcacgagcggcacgagcggcggtagtcagggcagtttctacgcaggcttaaggaggcttcgggctcctgggatttctgtccgcgctcctggcccacgtccttcgcgccagagcaggttcgcaaactcctcagacccttctgctcccggccgccgctttccgccggggcgagacccccaggttcaaaatgagcctgtttggaacaacctcaggttttggaaccagtgggaccagcatgtttggcagtgcaactacagacaatcacaatcccatgaaggatattgaagtaacatcatctcctgatgatagcattggttgtctgtcttttagcccaccaaccttgccggggaactttcttattgcaggatcatgggctaatgatgttcgctgctgggaagttcaagacagtggacagaccattccaaaagcccagcagatgcacactgggcctgtgcttgatgtctgctggagtgacgatgggagcaaagtgtttacggcatcgtgtgataaaactgccaaaatgtgggacctcagcagtaaccaagcgatacagatcgcacagcatgatgctcctgttaaaaccatccattggatcaaagctccaaactacagctgtgtgatgactgggagctgggataagactttaaagttttgggatactcgatcgtcaaatcctatgatggttttgcaactccctgaaaggtgttactgtgctgacgtgatataccccatggctgtggtggcaactgcagagaggggcctgattgtctatcagctagagaatcaaccttctgaattcaggaggatagaatctccactgaaacatcagcatcggtgtgtggctatttttaaagacaaacagaacaagccgactggttttgccctgggaagtatcgaggggagagttgctattcactatatcaaccccccgaaccccgccaaagataacttcacctttaaatgtcatcgatctaatggaaccaacacttcagctcctcaggacatttatgcggtaaatggaatcgcgttccatcctgttcatggcacccttgcaactgtgggatctgatggtagattcagcttctgggacaaagatgccagaacaaaactaaaaacttcggaacagttagatcagcccatctcagcttgctgtttcaatcacaatggaaacatatttgcatacgcttccagctacgactggtcaaagggacatgaattttataatccccagaaaaaaaattacattttcctgcgtaatgcggccgaagagctaaagcccaggaataagaagtagtggctggagactctggctcagccagagttgtttctctccactctgcctcatctctgtacgaatttgggtcccagccttgttgggttgtcagccatggacatggatttcaacccctggagaaaacgatgtcattgttcagcagctgagagccccaggcgtccgcggcgacttgccgtctctccattccactgcctgttgcagagtttttctgtaactaagggggttgaggttattgtagacgttagattgcgggcaccgccagggattttgcagcgcttcagtgtacgtgttagagaatattggaaaagcgtctgtgagccccgtgctgtattttgtaataaagtcttttgcagattgaataaaaaaaaaaaaaaa

SEQ ID NO: 1162 - DNA, 482 bp, Homo sapiens
tgcgctgacagcagccatggcgagcggcagtggagacagcgtcacccgtcggagcgtggcatcacagtttttcactcaagaggaggggccgggcatcgatggcatgaccacctcagagagggtggtggatcttctgaaccaggcggcgctgatcaccaatgactcaaagatcacagtgctcaaacaggtccaggagctgatcatcaacaaagaccccacactactggacaacttcctggatgagatcatcgcattccaagcagacaagtcaatcgaagtgcgaaaatttgtcatcggcttcatcgaggaggcatgcaagcgagacatcgagttgctgctgaaactcattgcaaacctcaacatgctcttgagggacgagaatgtgaacgtggtgaagaaggctatcctcaccatgacccagctctacaaggtggccctgcagtggatggtaaagtcacgggtcattagcgagctacaggagg

SEQ ID NO: 1163 - DNA, 934 bp, Homo sapiens
gagcgagcgcgctgcagcgcgcgcatggctagcacggcttcggagatcatcgccttcatggtctccatctcaggctgggtactggtgtcctccacgctgcccaccgactactggaaggtgtctaccatcgacggcacggtcatcacaaccgccacctattgggccaacctgtggaaggcgtgcgttaccgactccacgggcgtctccaactgcaaggacttcccctccatgctggcgctggacggttatatacaggcatgtagaggacttatgatcgctgctgtcagcctgggcttctttggttccatatttgcgctctttggaatgaagtgtaccaaagtcggaggctccgataaagccaaagctaaaattgcttgtttggctgggattgtattcatactgtcagggctgtgctcaatgactggatgttccctatatgcaaacaaaatcacaacggaattctttgatcctctctttgttgagcaaaagtatgaattaggagccgctctgtttattggatgggcaggagcctcactgtgcataattggtggtgtcatattttgcttttcaatatctgacaacaacaaaacacccagatacacatacaacggggccacatctgtcatgtcttctcggacaaagtatcatggtggagaagattttaaaacaacaaacccttcaaaacagtttgataaaaatgcttatgtctaaaagagctcgctggcaagctgcctcttgagtttgttataaaagcgaactgttcacaaaatgatcccatcaaggccctcccataattaacactcaaaactatttttaaaatatgcatttgaagcatctgttgattgtatggatgtaagtgttcttacatagttagttatatactaatcattttctgttgtggctttctataaaaaataaacagtttatttacagg

SEQ ID NO: 1164 - DNA, 1356 bp, Homo sapiens
gtatatataacgtgatgagcgtacgggtgcggagacgcaccggagcgctcgcccagccgccgyctccaagcccctgaggtttccggggaccacaatgaacaagttgctgtgctgcgcgctcgtgtttctggacatctccattaagtggaccacccaggaaacgtttcctccaaagtaccttcattatgacgaagaaacctctcatcagctgttgtgtgacaaatgtcctcctggtacctacctaaaacaacactgtacagcaaagtggaagaccgtgtgcgccccttgccctgaccactactacacagacagctggcacaccagtgacgagtgtctatactgcagccccgtgtgcaaggagctgcagtacgtcaagcaggagtgcaatcgcacccacaaccgcgtgtgcgaatgcaaggaagggcgctaccttgagatagagttctgcttgaaacataggagctgccctcctggatttggagtggtgcaagctggaaccccagagcgaaatacagtttgcaaaagatgtccagatgggttcttctcaaatgagacgtcatctaaagcaccctgtagaaaacacacaaattgcagtgtctttggtctcctgctaactcagaaaggaaatgcaacacacgacaacatatgttccggaaacagtgaatcaactcaaaaatgtggaatagatgttaccctgtgtgaggaggcattcttcaggtttgctgttcctacaaagtttacgcctaactggcttagtgtcttggtagacaatttgcctggcaccaaagtaaacgcagagagtgtagagaggataaaacggcaacacagctcacaagaacagactttccagctgctgaagttatggaaacatcaaaacaaagcccaagatatagtcaagaagatcatccaagatattgacctctgtgaaaacagcgtgcagcggcacattggacatgctaacctcaccttcgagcagcttcgtagcttgatggaaagcttaccgggaaagaaagtgggagcagaagacattgaaaaaacaataaaggcatgcaaacccagtgaccagatcctgaagctgctcagtttgtggcgaataaaaaatggcgaccaagacaccttgaagggcctaatgcacgcactaaagcactcaaagacgtaccactttcccaaaactgtcactcagagtctaaagaagaccatcaggttccttcacagcttcacaatgtacaaattgtatcagaagttatttttagaaatgataggtaaccaggtccaatcagtaaaaataagctgcttataactggaaatggccattgagctgtttcctcacaattggcgagatcccatggatgataa

SEQ ID NO: 1165 - DNA, 1050 bp, Homo sapiens; identical to SEQ ID NO: 84

SEQ ID NO: 1166 - DNA, 1755 bp, Homo sapiens
gaattccggcggcggccgcgagcgcgctcggtccccggcgccggcctcgcctcctcgcagcagcgccatggatgagttccacccgttcatcgaggccctgctgcctcacgtccgcgccttcgcctacacctggttcaacctgcaggcgcggaagcgcaagtacttcaagaagcacgagaagcggatgtcgaaggacgaggagcgtgcggtcaaggacgagctgctgggcgagaagcccgaggtcaagcagaagtgggcgtcgcggctgctggccaagctgcgcaaggacatccggcccgagtgccgcgaggacttcgtgctgagcatcaccggcaagaaggcgccgggctgcgtgctctccaaccccgaccagaagggcaagatgcggcgcatcgactgtctccggcaggcggacaaggtgtggcggctggacctggtcatggtcatcctgttcaagggcatcccgctggagagcaccgacggcgagcgcctggtcaaggctgcgcagtgcggtcacccggtcctgtgcgtgcagccgcaccacattggcgtggccgtcaaggagctggacctctacctggcctacttcgtgcgtgagcgagatgcagagcaaagcggcagtccccggacagggatgggctctgaccaggaggacagcaagcccatcacgctggacacgaccgacttccaggagagctttgtcacctccggcgtgttcagcgtcactgagctcatccaagtgtcccggacacccgtggtgactggaacaggacccaacttctccctgggggagctgcaggggcacctggcatacgacctgaacccagccagcactggcctcagaagaacgctgcccagcacctcctccagtgggagcaagcggcacaaatcgggctcgatggaggaagacgtggacacgagccctggcggcgattactacacttcgcccagctcgcccacgagtagcagccgcaactggacggaggacatggaaggaggcatctcgtccccggtgaagaagacagagatggacaagtcaccattcaacagcccgtccccccaggactctccccgcctctccagcttcacccagcaccaccggcccgtcatcgccgtgcacagcgggatcgcccggagcccacacccgtcctccgctctgcatttccctacgacgtccatcctaccccagacggcctccacctacttcccccacacggccatccgctacccacctcatctcaacccccaggacccgctcaaagatcttgtctcgctggcctgcgacccagccagccagcaacctggaccgttaaatggaagtggtcagctcaaaatgcccagccactgcctttctgctcagatgctggcacctccgcccccggggctgccacggctggcgctcccccctgccaccaaacccgccaccacctccgagggaggagccacgtcgccgacctcgccttcctactctccgcccgacacgtcccctgcaaaccgttcctttgtgggattaggaccaagggatcctgcgggcatttatcaggcacagtcctggtatctgggatagcaaaggtcttcttccctcgccccttctccatcgtcccaggaatcccagggggcagcacagccgcccccggcccacgtttttggtggaaaattagagtgaacaagaacacccctgccgactcccagcccggccaaaaagacaaaacacatagacgcacacactcaggaggaaaagaaaaaccggaattc

SEQ ID NO: 1167 - DNA, 1807 bp, Homo sapiens
agcaggtggaaggagaggaagcggatgccgtggggtttacagcaggaaaatccgtggagacagcagatccgagaagcggcgatgtttgcgtagaaccctgtacgtgcttccttcggcctgtcgctcttcccttctctctgaccagcaccatgcttctcctggtgacaagccttctgctctgtgagttaccacacccagcattcctcctgatcccagagaaatcggatctgcgaacagtggcaccagcctctagtctcaatgtgaggtttgactccaggacgatgaatttaagctgggactgccaagaaaacacaaccttcagcaagtgtttcttaactgacaagaagaacagagtcgtggaacccaggctcagtaacaacgaatgttcgtgcacatttcgtgaaatttgtctgcatgaaggagtcacatttgaggttcacgtgaatactagtcaaagaggatttcaacagaaactgctttatccaaattcaggaagggagggtaccgctgctcagaatttctcctgtttcatctacaatgcggatttaatgaactgtacctgggcgaggggtccgacggccccccgtgacgtccagtattttttgtacatacgaaactcaaagagaaggagggagatccggtgtccttattacatacaagactcaggaacccatgtgggatgtcacctggataacctgtcaggattaacgtctcgcaattactttctggttaacggaaccagccgagaaattggcatccaattctttgattcacttttggacacaaagaaaatagaacgattcaaccctcccagcaatgtcaccgtacgttgcaacacgacgcactgcctcgtacggtggaaacagcccaggacctatcagaagctgtcgtacctggactttcagtaccagctggacgtccacagaaagaatacccagcctggcacggaaaacctactgattaatgtttctggtgatttggaaaatagatacaactttccaagctctgagcccagagcaaaacacagtgtgaagatcagagctgcagacgtccgcatcttgaattggagctcctggagtgaagccattgaatttggttctgacgacgggaacctcggctctgtgtacatttatgtgctcctaatcgtgggaacccttgtctgtggcatcgtcctcggcttcctctttaaaaggttccttaggatacagcggctgttcccgccagttccacagatcaaagacaaactgaatgataaccatgaggtggaagacgagatcatctgggaggaattcaccccagaggaagggaaaggctaccgcgaagaggtcttgaccgtgaaggaaattacctgagacccagagggtgtaggaatggcatggacatctccgcctccgcgacacgggggaactgttttcttgatgatgctgtgaacctttatatcattttctatgtttttatttaaaaacatgacatttggggccaggcgcggtggctcacgcctgtaatcccagcactttgggaggccaaggcaggcggatcacctgaggtcaggagttcaagaccagcctgcccaacatggtgaaaccccatctggactaaaaatgcagaaatttacccaggcacggcggcggacgcccatcatcccagctacttgggaggctgaggcaggagaattgcttgaacccgtgaggcggaggttgtagtgagccaagatcgcaccattgcacaccaacctgcgtgacagagcaagattgcatctcaaaacaaacaataataataaataataaaaacctgatatttggctggg

SEQ ID NO: 1168 - DNA, 2619 bp, Homo sapiens
gactcctaggggcttgcagacctagtgggagagaaagaacatcgcagcagccaggcagaaccaggacaggtgaggtgcaggctggctttcctctcgcagcgcggtgtggagtcctgtcctgcctcagggcttttcggagcctggatcctcaaggaacaagtagacctggccgcggggagtggggagggaaggggtgtctattgggcaacagggcggcaaagccctgaataaaggggcgcagggcaggcgcaagtgcagagccttcgtttgccaagtcgcctccagaccgcagacatgaaacttgtcttcctcgtcctgctgttcctcggggccctcggactgtgtctggctggccgtaggagaaggagtgttcagtggtgcgccgtatcccaacccgaggccacaaaatgcttccaatggcaaaggaatatgagaaaagtgcgtggccctcctgtcagctgcataaagagagactcccccatccagtgtatccaggccattgcggaaaacagggccgatgctgtgacccttgatggtggtttcatatacgaggcaggcctggccccctacaaactgcgacctgtagcggcggaagtctacgggaccgaaagacagccacgaactcactattatgccgtggctgtggtgaagaagggcggcagctttcagctgaacgaactgcaaggtctgaagtcctgccacacaggccttcgcaggaccgctggatggaatgtccctacagggacacttcgtccattcttgaattggacgggtccacctgagcccattgaggcagctgtggccaggttcttctcagccagctgtgttcccggtgcagataaaggacagttccccaacctgtgtcgcctgtgtgcggggacaggggaaaacaaatgtgccttctcctcccaggaaccgtacttcagctactctggtgccttcaagtgtctgagagacggggctggagacgtggcttttatcagagagagcacagtgtttgaggacctgtcagacgaggctgaaagggacgagtatgagttactctgcccagacaacactcggaagccagtggacaagttcaaagactgccatctggcccgggtcccttctcatgccgttgtggcacgaagtgtgaatggcaaggaggatgccatctggaatcttctccgccaggcacaggaaaagtttggaaaggacaagtcaccgaaattccagctctttggctcccctagtgggcagaaagatctgctgttcaaggactctgccattgggttttcgagggtgcccccgaggatagattctgggctgtaccttggctccggctacttcactgccatccagaacttgaggaaaagtgaggaggaagtggctgcccggcgtgcgcgggtcgtgtggtgtgcggtgggcgagcaggagctgcgcaagtgtaaccagtggagtggcttgagcgaaggcagcgtgacctgctcctcggcctccaccacagaggactgcatcgccctggtgctgaaaggagaagctgatgccatgagtttggatggaggatatgtgtacactgcatgcaaatgtggtttggtgcctgtcctggcagagaactacaaatcccaacaaagcagtgaccctgatcctaactgtgtggatagacctgtggaaggatatcttgctgtggcggtggttaggagatcagacactagccttacctggaactctgtgaaaggcaagaagtcctgccacaccgccgtggacaggactgcaggctggaatatccccatgggcctgctcttcaaccagacgggctcctgcaaatttgatgaatatttcagtcaaagctgtgcccctgggtctgacccgagatctaatctctgtgctctgtgtattggcgacgagcagggtgagaataagtgcgtgcccaacagcaacgagagatactacggctacactggggctttccggtgcctggctgagaatgctggagacgttgcatttgtgaaagatgtcactgtcttgcagaacactgatggaaataacaatgaggcatgggctaaggatttgaagctggcagactttgcgctgctgtgcctcgatggcaaacggaagcctgtgactgaggctagaagctgccatcttgccatggccccgaatcatgccgtggtgtctcggatggataaggtggaacgcctgaaacaggtgctgctccaccaacaggctaaatttgggagaaatggatctgactgcccggacaagttttgcttattccagtctgaaaccaaaaaccttctgttcaatgacaacactgagtgtctggccagactccatggcaaaacaacatatgaaaaatatttgggaccacagtatgtcgcaggcattactaatctgaaaaagtgctcaacctcccccctcctggaagcctgtgaattcctcaggaagtaaaaccgaagaagatggcccagctccccaagaaagcctcagccattcactgcccccagctcttctccccaggtgtgttggggccttggctcccctgctgaaggtggggattgcccatccatctgcttacaattccctgctgtcgtcttagcaagaagtaaaatgagaaattttgttgatattcaaaaaaaa

SEQ ID NO: 1169 - DNA, 2500 bp, Homo sapiens; identical to SEQ ID NO: 724

SEQ ID NO: 1170 - DNA, 3437 bp, Homo sapiens
aagttcagtgcctaccgaagacaaaggcgccccgagggagtggcggtgcgaccccagggcgtgggcccggccgcggagcccacactgcccggctgacccggtggtctcggaccatgtctcccgccccaagacccccccgttgtctcctgctccccctgctcacgctcggcaccgcgctcgcctccctcggctcggcccaaagcagcagcttcagccccgaagcctggctacagcaatatggctacctgcctcccggggacctacgtacccacacacagcgctcaccccagtcactctcagcggccatcgctgccatgcagaagttttacggcttgcaagtaacaggcaaagctgatgcagacaccatgaaggccatgaggcgcccccgatgtggtgttccagacaagtttggggctgagatcaaggccaatgttcgaaggaagcgctacgccatccagggtctcaaatggcaacataatgaaatcactttctgcatccagaattacacccccaaggtgggcgagtatgccacatacgaggccattcgcaaggcgttccgcgtgtgggagagtgccacaccactgcgcttccgcgaggtgccctatgcctacatccgtgagggccatgagaagcaggccgacatcatgatcttctttgccgagggcttccatggcgacagcacgcccttcgatggtgagggcggcttcctggcccatgcctacttcccaggccccaacattggaggagacacccactttgactctgccgagccttggactgtcaggaatgaggatctgaatggaaatgacatcttcctggtggctgtgcacgagctgggccatgccctggggctcgagcattccagtgacccctcggccatcatggcacccttttaccagtggatggacacggagaattttgtgctgcccgatgatgaccgccggggcatccagcaactttatgggggtgagtcagggttccccaccaagatgccccctcaacccaggactacctcccggccttctgttcctgataaacccaaaaaccccacctatgggcccaacatctgtgacgggaactttgacaccgtggccatgctccgaggggagatgtttgtcttcaaggagcgctggttctggcgggtgaggaataaccaagtgatggatggatacccaatgcccattggccagttctggcggggcctgcctgcgtccatcaacactgcctacgagaggaaggatggcaaattcgtcttcttcaaaggagacaagcattgggtgtttgatgaggcgtccctggaacctggctaccccaagcacattaaggagctgggccgagggctgcctaccgacaagattgatgctgctctcttctggatgcccaatggaaagacctacttcttccgtggaaacaagtactaccgtttcaacgaagagctcagggcagtggatagcgagtaccccaagaacatcaaagtctgggaagggatccctgagtctcccagagggtcattcatgggcagcgatgaagtcttcacttacttctacaaggggaacaaatactggaaattcaacaaccagaagctgaaggtagaaccgggctaccccaagtcagccctgagggactggatgggctgcccatcgggaggccggccggatgaggggactgaggaggagacggaggtgatcatcattgaggtggacgaggagggcggcggggcggtgagcgcggctgccgtggtgctgcccgtgctgctgctgctcctggtgctggcggtgggccttgcagtcttcttcttcagacgccatgggacccccaggcgactgctctactgccagcgttccctgctggacaaggtctgacgcccaccgccggcccgcccactcctaccacaaggactttgcctctgaaggccagtggcagcaggtggtggtgggtgggctgctcccatcgtcccgagccccctccccgcagcctccttgcttctctctgtcccctggctggcctccttcaccctgaccgcctccctccctcctgccccggcattgcatcttccctagataggtcccctgagggctgagtgggagggcggccctttccagcctctgcccctcaggggaaccctgtagctttgtgtctgtccagccccatctgaatgtgttgggggctctgcacttgaaggcaggaccctcagacctcgctggtaaaggtcaaatggggtcatctgctccttttccatcccctgacataccttaacctctgaactctgacctcaggaggctctgggcactccagccctgaaagccccaggtgtacccaattggcagcctctcactactctttctggctaaaaggaatctaatcttgttgagggtagagaccctgagacagtgtgagggggtggggactgccaagccaccctaagaccttgggaggaaaactcagagagggtcttcgttgctcagtcagtcaagttcctcggagatctgcctctgcctcacctaccccagggaacttccaaggaaggagcctgagccactggggactaagtgggcagaagaaacccttggcagccctgtgcctctcgaatgttagccttggatggggctttcacagttagaagagctgaaaccaggggtgcagctgtcaggtagggtggggccggtgggagaggcccgggtcagagccctgggggtgagcctgaaggccacagagaaagaaccttgcccaaactcaggcagctggggctgaggcccaaaggcagaacagccagagggggcaggaggggaccaaaaaggaaaatgaggacgtgcagcagcattggaaggctggggccgggcaggccaggccaagccaagcagggggccacagggtgggctgtggagctctcaggaagggccctgaggaaggcacacttgctcctgttggtccctgtccttgctgcccaggcagcgtggaggggaagggtagggcagccagagaaaggagcagagaaggcacacaaacgaggaatgaggggcttcacgagaggccacagggcctggctggccacgctgtcccggcctgctcaccatctcagtgaggggcaggagctggggctcgcttaggctgggtccacgcttccctggtgccagcacccctcaagcctgtctcaccagtggcctgccctctcgctcccccacccagcccacccattgaagtctccttgggccaccaaaggtggtggccatggtaccggggacttgggagagtgagacccagtggagggagcaagaggagagggatgtcgggggggtggggcacggggtaggggaaatggggtgaacggtgctggcagttcggctagatttctgtcttgtttgtttttttgttttgtttaatgtatatttttattataattattatatatgaattccaaaaaaaaaaaaaaaaaaaaa

SEQ ID NO: 1171 - DNA, 3314 bp, Homo sapiens
gaattccggcaggcgcccatggcgggctgagtcctgcccatgccctggtggcctggaagcctgcatgggcgccgtgcaaagatcaacgttttccagaggagcttttgggctcatcactggcctggggagggcttgacacggggttcccacagcttgccccacaccaccttcacacccacacacagcaggtccccgcggggccggtgcaggctgtggctgcccgcgctgcgctgttgctctgtcccggctggctggctccgagtgtggggcgctctgggccggggccgctggggcgcgcacagtggggtgacaggcggcctggctgcagaaacgttgcaccggtgcctgaggtgggaggatgtgatgacgcggcccacgcagcgggaacccaggcctttaaaaagcccaggaaacagcctcagctcaagcggtggctccactggaggaaaacacaccccggtctcacattaaagaagccaaactgtcggcttcaaagagaaaaggcaacatcctgtcacaggccatgctctggcaaaaacccacagctccggagcaagccccagccccggcccggccataccagggcgtccgtgtgaaggagccagtgaaggaactgctgaggaggaagcgaggccacgccagcagtggggcagcacctgcacctacggcggtggtgctgccccatcagcccctggcgacctacaccacagtgggtccttcctgcctggacatggaaggttctgtgtctgcagtgacagaggaggctgccctgtgtgccggctggctctcccagcccaccccggccaccctgcagcccctggccccatggacaccttacaccgagtatgtgccccatgaagctgtcagctgcccctactcagctgacatgtatgtgcagcccgtgtgccccagctacacggtggtggggccctcctcagtgttggcctatgcctctccgccactcatcaccaatgtcacgacaagaagctccgccacgcccgcagtggggcccccgctggagggcccagagcaccaggcacccctcacctatttcccgtggcctcagcccctttccacactacccacctccaccctgcagtaccggcctccggccccagccctacctgggccccagtttgtccagctccccatctctatcccagagccagtccttcaggacatggaagaccccagaagagccgccagctcgttgaccatcgacaagctgcttttggaggaagaggatagcgacgcctatgcgcttaaccacactctctctgtggaaggcttttaggcgtggctcccacctgagtcctgttccctgaaactgggattttaaaatgagcctggaattgagccccaggttcatgcttgtttggagtagtcatttcatgactactctttctacgcacagctagaattgtagacctgtaaaccttccttcccttcttccttcccctccctccctcacttcctccctctcccccatccttccattcttcccctccctcccttcttcctttccaaccccttccttccttttcctccctcccttccttccctccttcccttctccctttccaaccccttccttccttttcctccctcccttccttccctccttcccttctccctttccttctttacctccctccctccctcgcttcttctctctttcttacttcttttttcaattctgttccattttgggaggtaattatagggattttagcaataacattttatgtcaaatgttgccaagtctgtggtccatgggctttcatttctgtcacatttcatttcttggaaaaggcctccttcctccagtgcctgctgaaccatcttagggtcactcacaccctctgtaattttaagatgtatgtggtggccggcgggaagaccagccccgacagcacctcctgagaaagtcagccaagggcctaccctgatgccagagtccttgagctgtcagttcccacagttgctcctttgtttgctcttctcagcctcggccagatttacagtccaggcagcaaaatctcaaggcctggggctcagagtagtaaggggtgggaagtgggtggcagggagaaaagaacatcagggtgggtggggacaggccagtgacgaagagagggacagaggagggatgggaacaggctgtgcatcttagttggagagaggggtgtgggaggaagcttgagtttgatgcagggaggaggaaggctgaggaatgacttggctccagattacttggttattaagaagaacaataaactaaaggaaagcattgcttgaagagatggttttgctgctctccttgaggatacgtgcaagggaagttgggctgttgtaaacagggtgaagggtgtgtttggtcggccatttctctctcacctctaggccctctgctggtgctgtggaggccaagaccccattaagcctaaaggtgatgggtcctcgcctaggcttagtgctaccatgtgggttttgtttctttccttccttccttccttccttccttccttccttccttccttccttccttccttccttccttccttctttccttccttccttccttccttccttcctctctctttctttcttttttttggttttttttgggacggagtctcactccattgcccaggctggagtacaatggtgcgatcttggctcactgcacctctgtctcccaagttcaagtgattctcctgcctgagcctcccgagtagctgggattacaggtgcatgccaccatgcctggctaatttttgtatttttagtagagacggggtttcaccatgttggccaggctggtctcgaactcctgaccttgtgatccgcgcgcctcagcctctcagagtgctgggatcacaggcgtgagccaccgcacccagccttttaccatgtgggtttctttagtgtcttaaaagcgtccataagccaccattctgtggaaccaaggccccctccacgcaaacaccctccctcctggggacctctggagcctcagccagaagtaccattaggtttaattttaatttgttttgctggagaaacatcaggtttgtaggagactgagttgttagcaggtgtgcttagctcttgatagtgaacgtgtaccttgggaactggctcacccacctgctaatagcaccatcgtcactattaagcagacatttcagttggtagaatccatgtagaagtcatggacttttctgggaaatgacttttctgggaaatgacagtttctttgacatattttctttgcccactttaaataaaaactctggagaaaaaaaaaaaaa

SEQ ID NO: 1172 - DNA, 5420 bp, Homo sapiens
ccaagttgaaaacccaaaccaatgcatctgactttcccattgggacatctttaaagtacgaatgccgtcctgagtactacgggaggccattctctatcacatgtctagataacctggtctggtcaagtcccaaagatgtctgtaaacgtaaatcatgtaaaactcctccagatccagtgaatggcatggtgcatgtgatcacagacatccaggttggatccagaatcaactattcttgtactacagggcaccgactcattggtcactcatctgctgaatgtatcctctcgggcaatgctgcccattggagcacgaagccgccaatttgtcaacgaattccttgtgggctaccccccaccatcgccaatggagatttcattagcaccaacagagagaattttcactatggatcagtggtgacctaccgctgcaatcctggaagcggagggagaaaggtgtttgagcttgtgggtgagccctccatatactgcaccagcaatgacgatcaagtgggcatctggagcggcccggcccctcagtgcattatacctaacaaatgcacgcctccaaatgtggaaaatggaatattggtatctgacaacagaagcttattttccttaaatgaagttgtggagtttaggtgtcagcctggctttgtcatgaaaggaccccgccgtgtgaagtgccaggccctgaacaaatgggagccggagctaccaagctgctccagggtatgtcagccacctccagatgtcctgcatgctgagcgtacccaaagggacaaggacaacttttcacccgggcaggaagtgttctacagctgtgagcccggctatgacctcagaggggctgcgtctatgcgctgcacaccccagggagactggagccctgcagcccccacatgtgaagtgaaatcctgtgatgacttcatgggccaacttcttaatggccgtgtgctatttccagtaaatctccagcttggagcaaaagtggattttgtttgtgatgaaggatttcaattaaaaggcagctctgctagttattgtgtcttggctggaatggaaagcctttggaatagcagtgttccagtgtgtgaacaaatcttttgtccaagtcctccagttattcctaatgggagacacacaggaaaacctctggaagtctttccctttggaaaagcagtaaattacacatgcgacccccacccagacagagggacgagcttcgacctcattggagagagcaccatccgctgcacaagtgaccctcaagggaatggggtttggagcagccctgcccctcgctgtggaattctgggtcactgtcaagccccagatcattttctgtttgccaagttgaaaacccaaaccaatgcatctgactttcccattgggacatctttaaagtacgaatgccgtcctgagtactacgggaggccattctctatcacatgtctagataacctggtctggtcaagtcccaaagatgtctgtaaacgtaaatcatgtaaaactcctccagatccagtgaatggcatggtgcatgtgatcacagacatccaggttggatccagaatcaactattcttgtactacagggcaccgactcattggtcactcatctgctgaatgtatcctctcaggcaatactgcccattggagcacgaagccgccaatttgtcaacgaattccttgtgggctacccccaaccatcgccaatggagatttcattagcaccaacagagagaattttcactatggatcagtggtgacctaccgctgcaatcttggaagcagagggagaaaggtgtttgagcttgtgggtgagccctccatatactgcaccagcaatgacgatcaagtgggcatctggagcggccccgcccctcagtgcattatacctaacaaatgcacgcctccaaatgtggaaaatggaatattggtatctgacaacagaagcttattttccttaaatgaagttgtggagtttaggtgtcagcctggctttgtcatgaaaggaccccgccgtgtgaagtgccaggccctgaacaaatgggagccagagttaccaagctgctccagggtgtgtcagccgcctccagaaatcctgcatggtgagcataccccaagccatcaggacaacttttcacctgggcaggaagtgttctacagctgtgagcctggctatgacctcagaggggctgcgtctctgcactgcacaccccagggagactggagccctgaagccccgagatgtgcagtgaaatcctgtgatgacttcttgggtcaactccctcatggccgtgtgctatttccacttaatctccagcttggggcaaaggtgtcctttgtctgtgatgaagggtttcgcttaaagggcagttccgttagtcattgtgtcttggttggaatgagaagcctttggaataacagtgttcctgtgtgtgaacatatcttttgtccaaatcctccagctatccttaatgggagacacacaggaactccctctggagatattccctatggaaaagaaatatcttacacatgtgacccccacccagacagagggatgaccttcaacctcattggggagagcaccatccgctgcacaagtgaccctcatgggaatggggtttggagcagccctgcccctcgctgtgaactttctgttcgtgctggtcactgtaaaaccccagagcagtttccatttgccagtcctacgatcccaattaatgactttgagtttccagtcgggacatctttgaattatgaatgccgtcctgggtattttgggaaaatgttctctatctcctgcctagaaaacttggtctggtcaagtgttgaagacaactgtagacgaaaatcatgtggacctccaccagaacccttcaatggaatggtgcatataaacacagatacacagtttggatcaacagttaattattcttgtaatgaagggtttcgactcattggttccccatctactacttgtctcgtctcaggcaataatgtcacatgggataagaaggcacctatttgtgagatcatatcttgtgagccacctccaaccatatccaatggagacttctacagcaacaatagaacatcttttcacaatggaacggtggtaacttaccagtgccacactggaccagatggagaacagctgtttgagcttgtgggagaacggtcaatatattgcaccagcaaagatgatcaagttggtgtttggagcagccctccccctcggtgtatttctactaataaatgcacagctccagaagttgaaaatgcaattagagtaccaggaaacaggagtttcttttccctcactgagatcatcagatttagatgtcagcccgggtttgtcatggtagggtcccacactgtgcagtgccagaccaatggcagatgggggcccaagctgccacactgctccagggtgtgtcagccgcctccagaaatcctgcatggtgagcataccctaagccatcaggacaacttttcacctgggcaggaagtgttctacagctgtgagcccagctatgacctcagaggggctgcgtctctgcactgcacgccccagggagactggagccctgaagcccctagatgtacagtgaaatcctgtgatgacttcctgggccaactccctcatggccgtgtgctacttccacttaatctccagcttggggcaaaggtgtcctttgtttgcgatgaagggttccgattaaaaggcaggtctgctagtcattgtgtcttggctggaatgaaagccctttggaatagcagtgttccagtgtgtgaacaaatcttttgtccaaatcctccagctatccttaatgggagacacacaggaactccctttggagatattccctatggaaaagaaatatcttacgcatgcgacacccacccagacagagggatgaccttcaacctcattggggagagctccatccgctgcacaagtgaccctcaagggaatggggtttggagcagccctgcccctcgctgtgaactttctgttcctgctgcctgcccacatccacccaagatccaaaacgggcattacattggaggacacgtatctctatatcttcctgggatgacaatcagctacacttgtgaccccggctacctgttagtgggaaagggcttcattttctgtacagaccagggaatctggagccaattggatcattattgcaaagaagtaaattgtagcttcccactgtttatgaatggaatctcgaaggagttagaaatgaaaaaagtatatcactatggagattatgtgactttgaagtgtgaagatgggtatactctggaaggcagtccctggagccagtgccaggcggatgacagatgggaccctcctctggccaaatgtacctctcgtgcacatgatgctctcatagttggcactttatctggtacgatcttctttattttactcatcattttcctctcttggataattctaaagcacagaaaaggcaataatgcacatgaaaaccctaaagaagtggctatccatttacattctcaaggaggcagcagcgttcatccccgaactctgcaaacaaatgaagaaaatagcagggtccttccttgacaaagtactatacagctgaagaacatctcgaatacaattttggtgggaaaggagccaattgatttcaacagaatcagatctgagcttcataaagtctttgaagtgacttcacagagacgcagacatgtgcacttgaagatgctgccccttccctggtacctagcaaagctcctgcctctttgtgtgcgtcactgtgaaacccccacccttctgcctcgtgctaaacgcacacagtatctagtcaggggaaaagactgcatttaggagatagaaaatagtttggattacttaaaggaataaggtgttgcctggaatttctggtttgtaaggtggtcactgttcttttttaaaatatttgtaatatggaatgggctcagtaagaagagcttggaaaatgcagaaagttatgaaaaataagtcacttataattatgctacctactgataaccactcctaatattttgattcattttctgcctatcttctttcacatatgtgtttttttacatacgtacttttccccccttagtttgtttccttttattttatagagcagaaccctagtcttttaaacagtttagagtgaaatatatgctatatcagtttttactttctctagggagaaaaattaatttactagaaaggcatgaaatgatcatgggaagagtggttaagactactgaagagaaatatttggaaaataagatttcgatatcttctttttttttgagatggagtctggctctgtctcccaggctggagtgcagtggcgtaatctcggctcactgcaacgtccgcctcccg

SEQ ID NO: 1173 - DNA, 1885 bp, Homo sapiens
cgggcactcaccgtgtgtagttggcatctccgcgcgtccggacacccgatcccagcatccctgcctgcaggactgttcgtgttcagctcgcgtcctgcagctgtccgaggtgctccagttggaggctgaggttcccgggctctgtcgctgagtgggcggcggcaccggcggagatgcctgggaagaaggcgcgcaagaacgctcaaccgagccccgcgcgggctccagcagagctggaagtcgagtgtgctactcaactcaggagatttggagacaaactgaacttccggcagaaacttctgaatctgatatccaaactcttctgctcaggaacctgactgcatcaaaaacttgcatgaggggactccttcaaaagagttttctcaggaggtgcacgtttcatcaatttgaagaaagactgcattgtaattgagaggaatgtgaaggtgcattcatgggtgcccttggaaacggaagatggaatacatcaaagtgaatttctgttcaagttttcccagattatcattctttgggatgagagaacattataaaaccactttgtttattttaaagcaagaatggaagacccttgaaaataaagaagtaattattgacacatttcttttttacttagagaatcgttctagtgtttttgccgaagattaccgctggcctactgtgaaggtagatgacctgtgattagactgggcggctggggagaaacagttcagtgcattgttgttgttgctgtttttggtgttttgcttttcagtgccaactcagcacattgtatatgattcggtttatacatattaccttgttataatgaaaaaactcattctgagaacactgaaatgttatactcagtgttgatttcttcggtcactacacaacgtaaaatcatttgtttcttttgactcaaattgtattgcttctgttcagatgatctttcattcaatgtgttcctgttgggcgttactagaaactatggaaaactggaaaataactttgaaaaaattggataaagtataggagggttacttggggccagtaaatcagtagactgaacattcaatataataaaagaacatggggattttgtataaccagggataataaaaagaaaaagaagttaatttttaattgatgtttttgaaacttagtagaacaaatattcagaagtaacttgataagatatgaatgtttctaaagagtttctaaaggttcgaaatgctccttgtcacattagtgtgcatcctacaaaaagtgatctcttaatgtaaattaagaatattttcataattggaatatacttttcttaaaaaaaaggaacagttagttctcatctagaatgaaagttccatatatgcattggtgaatatatatgtatacacatacttacatacttatatgggtatctgtatagataatttgtattagagtattatatagcttcttagtagggtctcaagtaagttcattttttttatctgggctatatacagtcctcaaataaataatgtcttgattttatttcagcaggaataattttatttattttgcctatttataattaaagtatttttctttagtttgaaatgtgtattaaagttacatttttgagttacaagagtcttataactacttgaatttttagttaaaatgtcttaatgtaggttgtagtcactttagatggaaaattacctcacatctgttttcttcagtattacttaagattgtttatttagtggtagagagattttttttttcagcctagaggcagctattttaccatctggtatttatggtctaatttgtatttaaacatatgcacacatataaaagttgatactgtggcagtaaactattaaaagttttcactgtt

SEQ ID NO: 1174 - DNA, 2244 bp, Homo sapiens
ctgcagacgaggcagggagaggcgggacttcgcgggcgagacgtcatcggggcgccggacgccggggcgcctgggagtttgaagcaaacaggcagcgcgcgacaatggcggtcgctcgtgcagctttggggccattggtgacgggtctgtacgacgtgcaggctttcaagtttggggacttcgtgctgaagagcgggctttcctcccccatctacatcgatctgcggggcatcgtgtctcgaccgcgtcttctgagtcaggttgcagatattttattccaaactgcccaaaatgcaggcatcagttttgacaccgtgtgtggagtgccttatacagctttgccattggctacagttatctgttcaaccaatcaaattccaatgcttattagaaggaaagaaacaaaggattatggaactaagcgtcttgtagaaggaactattaatccaggagaaacctgtttaatcattgaagatgttgtcaccagtggatctagtgttttggaaactgttgaggttcttcagaaggagggcttgaaggtcactgatgccatagtgctgttggacagagagcagggaggcaaggacaagttgcaggcgcacgggatccgcctccactcagtgtgtacattgtccaaaatgctggagattctcgagcagcagaaaaaagttgatgctgagacagttgggagagtgaagaggtttattcaggagaatgtctttgtggcagcgaatcataatggttctcccctttctataaaggaagcacccaaagaactcagcttcggtgcacgtgcagagctgcccaggatccacccagttgcatcgaagcttctcaggcttatgcaaaagaaggagaccaatctgtgtctatctgctgatgtttcactggccagagagctgttgcagctagcagatgctttaggacctagtatctgcatgctgaagactcatgtagatattttgaatgattttactctggatgtgatgaaggagttgataactctggcaaaatgccatgagttcttgatatttgaagaccggaagtttgcagatataggaaacacagtgaaaaagcagtatgaaggaggtatctttaaaatagcttcctgggcagatctagtaaatgctcacgtggtgccaggctcaggagttgtgaaaggcctgcaagaagtgggcctgcctttgcatcgggggtgcctccttattgcggaaatgagctccaccggctccctggccactggggactacactagagcagcggttagaatggctgaggagcactctgaatttgttgttggttttatttctggctcccgagtaagcatgaaaccagaatttcttcacttgactccaggagttcagttggaagcaggaggagataatcttggccaacagtacaatagcccacaagaagttattggcaaacgaggttccgatatcatcattgtaggtcgtggcataatctcagcagctgatcgtctggaagcagcagagatgtacagaaaagctgcttgggaagcgtatttgagtagacttggtgtttgagtgcttcagatacatttttcagatacaatgtgaagacattgaagatatgtggtcctcctgaaagtcactggctggaaataatccaattattcctgcttggattcttccacagggcctgtgtaagaatgggttctggagttctcatggtctttaggaaatattgagtaatttgtaatcaccgcattgatactataataagttcattcttaagcttgctttttttgagactggtgtttgttagacagccacagtcctgtctgggttagggtcttccacatttgaggatccttcctatctctccatgggactagactgctttgttattctatttattttttaatttttttcgagacaggatctcactctgttgcccaggatggagtgcagtggtgagatcacggctcattgcagcctcgacctcccaggtgatcctcccacctcagcttccagattagctggtgctataggcatgcaccaccacgtccatctaaatttctttattatttgtagagatgaggtcttgccatgttacccaggctggtctcaactcctgggctcaagcgatcctcctgcctcagtctctcaaagtgctgggattacaggtgtgagccactgtgcccagcctaattgcagtaagacaaaaattctagggcaccaagaggctaaagtcagcacagcttttcttgtgtcctgtatt

SEQ ID NO: 1175 - DNA, 848 bp, Homo sapiens
cagtctcaatgggggcactggggctggagggcaggggtgggaggctccaggggaggggttccctcctgctagctgtggcaggagccacttctctggtgaccttgttgctggcggtgcctatcactgtcctggctgtgctggccttagtgccccaggatcagggaggactgggtttcagaagctgccagaggaggagccagaaacagatctcagccccgggctcccagctgcccacctcataggcgctccgctgaaggggcaggggctaggctgggagacgacgaaggaacaggcgtttctgacgagcgggacgcagttctcggacgccgaggggctggcgctcccgcaggacggcctctattacctctactgtctcgtcggctaccggggccgggcgccccctggcggcggggacccccagggccgctcggtcacgctgcgcagctctctgtaccgggcggggggcgcctacgggccgggcactcccgagctgctgctcgagggcgccgagacggtgactccagtgctggacccggccaggagacaagggtacgggcctctctggtacacgagcgtggggttcggcggcctggtgcagctccggaggggcgagagggtgtacgtcaacatcagtcaccccgatatggtggacttcgcgagagggaagaccttctttggggccgtgatggtggggtgagggaatatgagtgcgtggtgcgagtgcgtgaatattgggggcccggacgcccaggaccccatggcagtgggaaaaatgtaggagactgtttggaaattgattttgaacctgatgaaaataaagaatggaaagcttcagtgctgccgataaa

SEQ ID NO: 1176 - DNA, 1266 bp, Homo sapiens
gaattccaataaatgtgaatgttggaccccaaatgattataagcacaccacagagactaaccagttcaggaagtgttctgattgggagtccatatacccctgcaccagcaatggttactcagacacacatagcagaagctactggctgggtccctggtgatagaaaacgggctagaaaatttatagactctgatttttcagaaagtaaacgaagcaaaaaaggagataaaaatgggaaaggcttgagacacttttcaatgaaagtgtgtgagaaagttcaacgaaaaggtacaacatcgtacaatgaagtcgctgatgagctggtgtcagagttcaccaattcaaataaccatttggctgctgattcggcttatgatcagaagaacattaggcgaagagtttatgatgctttaaatgtgctaatggcaatgaacataatttcaaaggaaaaaaaagaaatcaagtggattggcctgcctaccaattctgctcaggaatgtcagaatctggagatagagaagcagaggcggatagaacggataaagcagaagcgggcccagctgcaagaacttctcctacagcaaatcgctttcaaaaacctggtacagagaaatcgacaaaatgagcagcaaaaccagggcccgccggctctgaactctaccattcagctgccattcataatcatcaatacaagcagaaaaacagtcatagattgcagcatctccagtgacaagtttgagtatcttttcaattttgacaacacctttgagatccatgatgacatagaagtactaaagcggatgggaatgtcgtttggcctggagtcaggcaaatgctctctggaggatctgaaacttgcgaaatccctggtgccaaaggctttagaaggttatatcacagatatctccacaggaccttcttggttaaatcagggactacttctgaactctacccaatcagtttcaaatttagacctgaccactggtgccaccttaccccagtcaagtgtaaaccaagggttatgcttggatgcagaagtggccttagcaactgggcagttcctggccccaaacagtcaccagtccagcagtgcggcctctcactgctccgagtcccgaggcgagaccccctgttcgttcaatgatgaagatgaggaagatgatgaggaggattcctcctccccagaataaagacaagagaaagcctaaaaaaaaaaaaaaaaaaaaaaaaaaaaaaaaaaaaaaaaaaaaaaatctagggaattcc

SEQ ID NO: 1177 - DNA, 193 bp, Homo sapiens
acagcttaggtgtgtctttctgtcttctacaggccttcctggaaaacgaggatctgggaaactcactgggcagtgcagaagcccttcttcagaagcatgaagactttgaggaagcctttactgcccaggaagagaagatcatagtaagaaattggccctagtttgggcattggctccctctctgtatacataa

SEQ ID NO: 1178 - DNA, 3291 bp, Homo sapiens
accgggcaagcgggaaccaggtggccacccggtgtcggtttcattttcctttggaatttctgctttacagacagaacaatggcagcccgagtacttataattggcagtggaggaagggaacatacgctggcctggaaacttgcacagtctcatcatgtcaaacaagtgttggttgccccaggaaacgcaggcactgcctgctctgaaaagatttcaaataccgccatctcaatcagtgaccacactgcccttgctcaattctgcaaagagaagaaaattgaatttgtagttgttggaccagaagcacctctggctgctgggattgttgggaacctgaggtctgcaggagtgcaatgctttggcccaacagcagaagcggctcagttagagtccagcaaaaggtttgccaaagagtttatggacagacatggaatcccaaccgcacaatggaaggctttcaccaaacctgaagaagcctgcagcttcattttgagtgcagacttccctgctttggttgtgaaggccagtggtcttgcagctggaaaaggggtgattgttgcaaagagcaaagaagaggcctgcaaagctgtacaagagatcatgcaggagaaagcctttggggcagctggagaaacaattgtcattgaagaacttcttgacggagaagaggtgtcgtgtctgtgtttcactgatggcaagactgtggcccccatgcccccagcacaggaccataagcgattactggagggagatggtggccctaacacagggggaatgggagcctattgtccagcccctcaggtttctaatgatctattactaaaaattaaagatactgttcttcagaggacagtggatggcatgcagcaagagggtactccatatacaggtattctctatgctggaataatgctgaccaagaatggcccaaaagttctagagtttaattgccgttttggtgatccagagtgccaagtaatcctcccacttcttaaaagtgatctttatgaagtgattcagtccaccttagatggactgctctgcacatctctgcctgtttggctagaaaaccacaccgccctaactgttgtcatggcaagtaaaggttatcctggagactacaccaagggtgtagagataacagggtttcctgaggctcaagctctaggactggaggtgttccatgcaggcactgccctcaaaaatggcaaagtagtaactcatgggggtagagttcttgcagtcacagccatccgggaaaatctcatatcagcccttgaggaagccaagaaaggactagctgctataaagtttgagggagcaatttataggaaagacgtcggctttcgtgccatagctttcctccagcagcccaggagtttgacttacaaggaatctggagtagatatcgcagctggaaatatgctggtcaagaaaattcagcctttagcaaaagccacttccagatcaggctgtaaagttgatcttggaggttttgctggtctttttgatttaaaagcagctggtttcaaagatccccttctggcctctggaacagatggcgttggaactaaactaaagattgcccagctatgcaataaacatgataccattggtcaagatttggtagcaatgtgtgttaatgatattctggcacaaggagcagagcccctcttcttccttgattacttttcctgtggaaaacttgacctcagtgtaactgaagctgttgttgctggaattgctaaagcttgtggaaaagctggatgtgctctccttggaggtgaaacagcagaaatgcctgacatgtatccccctggagagtatgacctagctgggtttgccgttggtgccatggagcgagatcagaaactccctcacctggaaagaatcactgagggtgatgttgttgttggaatagcttcatctggtcttcatagcaatggatttagccttgtgaggaaaatcgttgcaaaatcttccctccagtactcctctccagcacctgatggttgtggtgaccagactttaggggacttacttctcacgcctaccagaatctacagccattcactgttacctgtcctacgttcaggacatgtcaaagcctttgcccatattactggtggaggattactagagaacatccccagagtcctccctgagaaacttggggtagatttagatgcccagacctggaggatccccagggttttctcatggttgcagcaggaaggacacctctctgaggaagagatggccagaacatttaactgtggggttggcgctgtccttgtggtatcaaaggagcagacagagcagattctgagggatatccagcagcacaaggaagaagcctgggtgattggcagtgtggttgcacgagctgaaggttccccacgtgtgaaagtcaagaatctgattgaaagcatgcaaataaatgggtcagtgttgaagaatggctccctgacaaatcatttctcttttgaaaaaaaaaaggccagagtggctgtcttaatatctggaacaggatcgaacctgcaagcacttatagacagtactcgggaaccaaatagctctgcacaaattgatattgttatctccaacaaagccgcagtagctgggttagataaagcggaaagagctggtattcccactagagtaattaatcataaactgtataaaaatcgtgtagaatttgacagtgcaattgacctagtccttgaagagttctccatagacatagtctgtcttgcaggattcatgagaattctttctggcccctttgtccaaaagtggaatggaaaaatgctcaatatccacccatccttgctcccttcttttaagggttcaaatgcccatgagcaagccctggaaaccggagtcacagttactgggtgcactgtacactttgtagctgaagatgtggatgctggacagattattttgcaagaagctgttcccgtgaagaggggtgatactgtcgcaactctttctgaaagagtaaaattagcagaacataaaatatttcctgcagcccttcagctggtggccagtggaactgtacagcttggagaaaatggcaagatctgttgggttaaagaggaatgaagccttttaattcagaaatggggccagtttagaaagaattatttgctgtttgcatggtggttttttatcatggacttggcccaaaagaaaaactgctaaaagacaaaaaagacctcacccttacttcatctatttttttaataaatagagactcactaaaaaaaaaaaaaaaaaaaaaaa

SEQ ID NO: 1179 - DNA, 7364 bp, Homo sapiens
gcggcggcggctgcggcggtggggccgggcgaggtccgctgcggtcccggcggctccgtggctgctccgctctgagcgcctggcgcgccccgcgccctccctgccggggccgctgggccggggatgcacgcggggcccgggagccatggtccgcttcggggacgagctgggcggccgctatggaggccccggcggcggagagcgggcccggggcggcggggccggcggggcggggggcccgggtcccggggggctgcagcccggccagcgggtcctctacaagcaatcgatcgcgcagcgcgcgcggaccatggcgctgtacaaccccatcccggtcaagcagaactgcttcaccgtcaaccgctcgctcttcgtcttcagcgaggacaacgtcgtccgcaaatacgcgaagcgcatcaccgagtggcctccattcgagtatatgatcctggccaccatcatcgccaactgcatcgtgctggccctggagcagcacctccctgatggggacaaaacgcccatgtccgagcggctggacgacacggagccctatttcatcgggatcttttgcttcgaggcagggatcaaaatcatcgctctgggctttgtcttccacaagggctcttacctgcggaacggctggaacgtcatggacttcgtggtcgtcctcacagggatccttgccacggctggaactgacttcgacctgcgaacactgagggctgtgcgtgtgctgaggcccctgaagctggtgtctgggattccaagtttgcaggtggtgctcaagtccatcatgaaggccatggttccactcctgcagattgggctgcttctcttctttgccatcctcatgtttgccatcattggcctggagttctacatgggcaagttccacaaggcctgtttccccaacagcacagatgcggagcccgtgggtgacttcccctgtggcaaggaggccccagcccggctgtgcgagggcgacactgagtgccgggagtactggccaggacccaactttggcatcaccaactttgacaatatcctgtttgccatcttgacggtgttccagtgcatcaccatggagggctggactgacatcctctataatacaaacgatgcggccggcaacacctggaactggctctacttcatccctctcatcatcatcggctccttcttcatgctcaacctggtgctgggcgtgctctcgggggagtttgccaaggagcgagagagggtggagaaccgccgcgccttcctgaagctgcgccggcagcagcagatcgagcgagagctcaacgggtacctggagtggatcttcaaggcggaggaagtcatgctggccgaggaggacaggaatgcagaggagaagtcccctttggacgtgctgaagagagcggccaccaagaagagcagaaatgacctgatccacgcagaggagggagaggaccggtttgcagatctctgtgctgttggatcccccttcgcccgcgccagcctcaagagcgggaagacagagagctcgtcatacttccggaggaaggagaagatgttccggttttttatccggcgcatggtgaaggctcagagcttctactgggtggtgctgtgcgtggtggccctgaacacactgtgtgtggccatggtgcattacaaccagccgcggcggcttaccacgaccctgtattttgcagagtttgttttcctgggtctcttcctcacagagatgtccctgaagatgtatggcctggggcccagaagctacttccggtcctccttcaactgcttcgactttggggtcatcgtggggagcgtctttgaagtggtctgggcggccatcaagccgggaagctcctttgggatcagtgtgctgcgggccctccgcctgctgaggatcttcaaagtcacgaagtactggagctccctgcggaacctggtggtgtccctgctgaactccatgaagtccatcatcagcctgctcttcttgctcttcctgttcattgtggtcttcgccctgctggggatgcagctgtttgggggacagttcaacttccaggatgagactcccacaaccaacttcgacaccttccctgccgccatcctcactgtcttccagatcctgacgggagaggactggaatgcagtgatgtatcacgggatcgaatcgcaaggcggcgtcagcaaaggcatgttctcgtccttttacttcattgtcctgacactgttcggaaactacactctgctgaatgtctttctggccatcgctgtggacaacctggccaacgcccaagagctgaccaaggatgaagaggagatggaagaagcagccaatcagaagcttgctctgcaaaaggccaaagaagtggctgaagtcagccccatgtctgccgcgaacatctccatcgccgccaggcagcagaactcggccaaggcgcgctcggtgtgggagcagcgggccagccagctacggctgcagaacctgcgggccagctgcgaggcgctgtacagcgagatggaccccgaggagcggctgcgcttcgccactacgcgccacctgcggcccgacatgaagacgcacctggaccggccgctggtggtggagctgggccgcgacggcgcgcgggggcccgtgggaggcaaagcccgacctgaggctgcggaggcccccgagggcgtcgaccctccgcgcaggcaccaccggcaccgcgacaaggacaagacccccgcggcgggggaccaggaccgagcagaggccccgaaggcggagagcggggagcccggtgcccgggaggagcggccgcggccgcaccgcagccacagcaaggaggccgcggggcccccggaggcgcggagcgagcgcggccgaggcccaggccccgagggcggccggcggcaccaccggcgcggctccccggaggaggcggccgagcgggagccccgacgccaccgcgcgcaccggcaccaggatccgagcaaggagtgcgccggcgccaagggcgagcggcgcgcgcggcaccgcggcggcccccgagcggggccccgggaggcggagagcggggaggagccggcgcggcggcaccgggcccggcacaaggcgcagcctgctcacgaggctgtggagaaggagaccacggagaaggaggccacggagaaggaggctgagatagtggaagccgacaaggaaaaggagctccggaaccaccagccccgggagccacactgtgacctggagaccagtgggactgtgactgtgggtcccatgcacacactgcccagcacctgtctccagaaggtggaggaacagccagaggatgcagacaatcagcggaacgtcactcgcatgggcagtcagcccccagacccgaacactattgtacatatcccagtgatgctgacgggccctcttggggaagccacggtcgttcccagtggtaacgtggacctggaaagccaagcagaggggaagaaggaggtggaagcggatgacgtgatgaggagcggcccccggcctatcgtcccatacagctccatgttctgtttaagccccaccaacctgctccgccgcttctgccactacatcgtgaccatgaggtacttcgaggtggtcattctcgtggtcatcgccttgagcagcatcgccctggctgctgaggacccagtgcgcacagactcgcccaggaacaacgctctgaaatacctggattacattttcactggtgtctttacctttgagatggtgataaagatgatcgacttgggactgctgcttcaccctggagcctatttccgggacttgtggaacattctggacttcattgtggtcagtggcgccctggtggcgtttgctttctcaggatccaaagggaaagacatcaataccatcaagtctctgagagtccttcgtgtcctgcggcccctcaagaccatcaaacggctgcccaagctcaaggctgtgtttgactgtgtggtgaactccctgaagaatgtcctcaacatcttgattgtctacatgctcttcatgttcatatttgccgtcattgcggtgcagctcttcaaagggaagtttttctactgcacagatgaatccaaggagctggagagggactgcaggggtcagtatttggattatgagaaggaggaagtggaagctcagcccaggcagtggaagaaatacgactttcactacgacaatgtgctctgggctctgctgacgctgttcacagtgtccacgggagaaggctggcccatggtgctgaaacactccgtggatgccacctatgaggagcagggtccaagccctgggtaccgcatggagctgtccatcttctacgtggtctactttgtggtctttcccttcttcttcgtcaacatctttgtggctttgatcatcatcaccttccaggagcagggggacaaggtgatgtctgaatgcagcctggagaagaacgagagggcttgcattgacttcgccatcagcgccaaacccctgacacggtacatgccccaaaaccggcagtcgttccagtataagacgtggacatttgtggtctccccgccctttgaatacttcatcatggccatgatagccctcaacactgtggtgctgatgatgaagttctatgatgcaccctatgagtacgagctgatgctgaaatgcctgaacatcgtgttcacatccatgttctccatggaatgcgtgctgaagatcatcgcctttggggtgctgaactatttcagagatgcctggaatgtctttgactttgtcactgtgttgggaagtattactgatattttagtaacagagattgcggaaacgaacaatttcatcaacctcagcttcctccgcctctttcgagctgcgcggctgatcaagctgctccgccagggctacaccatccgcatcctgctgtggacctttgtccagtccttcaaggccctgccctacgtgtgtctgctcattgccatgctgttcttcatctacgccatcatcggcatgcaggtgtttgggaatattgccctggatgatgacaccagcatcaaccgccacaacaacttccggacgtttttgcaagccctgatgctgctgttcaggagcgccacgggggaggcctggcacgagatcatgctgtcctgcctgagcaaccaggcctgtgatgagcaggccaatgccaccgagtgtggaagtgactttgcctacttctacttcgtctccttcatcttcctgtgctcctttctgatgttgaacctctttgtggctgtgatcatggacaattttgagtacctcacgcgggactcttccatcctaggtcctcaccacttggatgagttcatccgggtctgggctgaatacgacccggctgcgtgtgggcgcatcagttacaatgacatgtttgagatgctgaaacacatgtccccgcctctggggctggggaagaaatgccctgctcgagttgcttacaagcgcctggttcgcatgaacatgcccatctccaacgaggacatgactgttcacttcacgtccacgctgatggccctcatccggacggcactggagatcaagctggccccagctgggacaaagcagcatcagtgtgacgcggagttgaggaaggagatttccgttgtgtgggccaatctgccccagaagactttggacttgctggtaccaccccataagcctgatgagatgacagtggggaaggtttatgcagctctgatgatatttgacttctacaagcagaacaaaaccaccagagaccagatgcagcaggctcctggaggcctctcccagatgggtcctgtgtccctgttccaccctctgaaggccaccctggagcagacacagccggctgtgctccgaggagcccgggttttccttcgacagaagagttccacctccctcagcaatggcggggccatacaaaaccaagagagtggcatcaaagagtctgtctcctggggcactcaaaggacccaggatgcaccccatgaggccaggccacccctggagcgtggccactccacagagatccctgtggggcggtcaggagcactggctgtggacgttcagatgcagagcataacccggaggggccctgatggggagccccagcctgggctggagagccagggtcgagcggcctccatgccccgccttgcggccgagactcagcccgtcacagatgccagccccatgaagcgctccatctccacgctggcccagcggccccgtgggactcatctttgcagcaccaccccggaccgcccaccccctagccaggcgtcgtcgcaccaccaccaccaccgctgccaccgccgcagggacaggaagcagaggtccctggagaaggggcccagcctgtctgccgatatggatggcgcaccaagcagtgctgtggggccggggctgcccccgggagaggggcctacaggctgccggcgggaacgagagcgccggcaggagcggggccggtcccaggagcggaggcagccctcatcctcctcctcggagaagcagcgcttctactcctgcgaccgctttgggggccgtgagcccccgaagcccaagccctccctcagcagccacccaacgtcgccaacagctggccaggagccgggaccccacccacagggcagtggttccgtgaatgggagccccttgctgtcaacatctggtgctagcacccccggccgcggtgggcggaggcagctcccccagacgcccctgactccccgccccagcatcacctacaagacggccaactcctcacccatccacttcgccggggctcagaccagcctccctgccttctccccaggccggctcagccgtgggctttccgaacacaacgccctgctgcagagagaccccctcagccagcccctggcccctggctctcgaattggctctgacccttacctggggcagcgtctggacagtgaggcctctgtccacgccctgcctgaggacacgctcactttcgaggaggctgtggccaccaactcgggccgctcctccaggacttcctacgtgtcctccctgacctcccagtctcaccctctccgccgcgtgcccaacggttaccactgcaccctgggactcagctcgggtggccgagcacggcacagctaccaccaccctgaccaagaccactggtgctagctgcaccgtgaccgctcagacgcctgcatgcagcaggcgtgtgttccagtggatgagttttatcatccacacggggcagtcggccctcgggggaggccttgcccaccttggtgaggctcctgtggcccctccctccccctcctcccctcttttactctagacgacgaataaagccctgttgcttgagtgtacgtaccgc

SEQ ID NO: 1180 - DNA, 2051 bp, Homo sapiens
gggcggggttcctggtccctggagctccgcacttggcggcgcaacctgcgtgaggcagcgcgactctggcgactggccggccatgccttcccgggctgaggactatgaagtgttgtacaccattggcacaggctcctacggccgctgccagaagatccggaggaagagtgatggcaagatattagtttggaaagaacttgactatggctccatgacagaagctgagaaacagatgcttgtttctgaagtgaatttgcttcgtgaactgaaacatccaaacatcgttcgttactatgatcggattattgaccggaccaatacaacactgtacattgtaatggaatattgtgaaggaggggatctggctagtgtaattacaaagggaaccaaggaaaggcaatacttagatgaagagtttgttcttcgagtgatgactcagttgactctggccctgaaggaatgccacagacgaagtgatggtggtcataccgtattgcatcgggatctgaaaccagccaatgttttcctggatggcaagcaaaacgtcaagcttggagactttgggctagctagaatattaaaccacgacacgagttttgcaaaaacatttgttggcacaccttattacatgtctcctgaacaaatgaatcgcatgtcctacaatgagaaatcagatatctggtcattgggctgcttgctgtatgagttatgtgcattaatgcctccatttacagcttttagccagaaagaactcgctgggaaaatcagagaaggcaaattcaggcgaattccataccgttactctgatgaattgaatgaaattattacgaggatgttaaacttaaaggattaccatcgaccttctgttgaagaaattcttgagaaccctttaatagcagatttggttgcagacgagcaaagaagaaatcttgagagaagagggcgacaattaggagagccagaaaaatcgcaggattccagccctgtattgagtgagctgaaactgaaggaaattcagttacaggagcgagagcgagctctcaaagcaagagaagaaagattggagcagaaagaacaggagctttgtgttcgtgagagactagcagaggacaaactggctagagcagaaaatctgttgaagaactacagcttgctaaaggaacggaagttcctgtctctggcaagtaatccagaacttcttaatcttccatcctcagtaattaagaagaaagttcatttcagtggggaaagtaaagagaacatcatgaggagtgagaattctgagagtcagctcacatctaagtccaagtgcaaggacctgaagaaaaggcttcacgctgcccagctgcgggctcaagccctgtcagatattgagaaaaattaccaactgaaaagcagacagatcctgggcatgcgctagccaggtagagagacacagagctgtgtacaggatgtaatattaccaacctttaaagactgatattcaaatgctgtagtgttgaatacttggttccatgagccatgcctttctgtatagtacacatgatatttcggaattggttttactgttcttcagcaactattgtacaaaatgttcacatttaatttttctttcttcttttaagaacatattataaaaagaatactttcttggttgggcttttaatcctgtgtgtgattactagtaggaacatgagatgtgacattctaaatcttgggagaaaaaataatgttagaaaaaaaatatttatgcaggaaggtagcactcactgaatagttttaaatgactgagtggtatgcttacaattgtcatgtctagatttaaattttaagtctgagattttaaatgtttttgagcttagaaaacccagttagatgcaatttggtcattaataccatgacatcttgcttataaatattccattgctctgtagttcaaatctgttagctttgtgaaaattcatcactgtgatgtttgtattctttttttttttctgtttaacagatatgagctgtctgtcatttacctacttctttcccactaaataaaa

SEQ ID NO: 1181 - DNA, 4543 bp, Homo sapiens
tgatgaggctgtgtgcttctgagctgggcatccgaaggcatccttggggaagctgagggcacgaggaggggctgccagactccgggagctgctgcctggctgggattcctacacaatgcgttgcctggctccacgccctgctgggtcctacctgtcagagccccaaggcagctcacagtgtgccaccatggagttggggcccctagaaggtggctacctggagcttcttaacagcgatgctgaccccctgtgcctctaccacttctatgaccagatggacctggctggagaagaagagattgagctctactcagaacccgacacagacaccatcaactgcgaccagttcagcaggctgttgtgtgacatggaaggtgatgaagagaccagggaggcttatgccaatatcgcggaactggaccagtatgtcttccaggactcccagctggagggcctgagcaaggacattttcaagcacataggaccagatgaagtgatcggtgagagtatggagatgccagcagaagttgggcagaaaagtcagaaaagacccttcccagaggagcttccggcagacctgaagcactggaagccagctgagccccccactgtggtgactggcagtctcctagtgggaccagtgagcgactgctccaccctgccctgcctgccactgcctgcgctgttcaaccaggagccagcctccggccagatgcgcctggagaaaaccgaccagattcccatgcctttctccagttcctcgttgagctgcctgaatctccctgagggacccatccagtttgtccccaccatctccactctgccccatgggctctggcaaatctctgaggctggaacaggggtctccagtatattcatctaccatggtgaggtgccccaggccagccaagtaccccctcccagtggattcactgtccacggcctcccaacatctccagaccggccaggctccaccagccccttcgctccatcagccactgacctgcccagcatgcctgaacctgccctgacctcccgagcaaacatgacagagcacaagacgtcccccacccaatgcccggcagctggagaggtctccaacaagcttccaaaatggcctgagccggtggagcagttctaccgctcactgcaggacacgtatggtgccgagcccgcaggcccggatggcatcctagtggaggtggatctggtgcaggccaggctggagaggagcagcagcaagagcctggagcgggaactggccaccccggactgggcagaacggcagctggcccaaggaggcctggctgaggtgctgttggctgccaaggagcaccggcggccgcgtgagacacgagtgattgctgtgctgggcaaagctggtcagggcaagagctattgggctggggcagtgagccgggcctgggcttgtggccggcttccccagtacgactttgtcttctctgtcccctgccattgcttgaaccgtccgggggatgcctatggcctgcaggatctgctcttctccctgggcccacagccactcgtggcggccgatgaggttttcagccacatcttgaagagacctgaccgcgttctgctcatcctagacgccttcgaggagctggaagcgcaagatggcttcctgcacagcacgtgcggaccggcaccggcggagccctgctccctccgggggctgctggccggccttttccagaagaagctgctccgaggttgcaccctcctcctcacagcccggccccggggccgcctggtccagagcctgagcaaggccgacgccctatttgagctgtccggcttctccatggagcaggcccaggcatacgtgatgcgctactttgagagctcagggatgacagagcaccaagacagagccctgacgctcctccgggaccggccacttcttctcagtcacagccacagccctactttgtgccgggcagtgtgccagctctcagaggccctgctggagcttggggaggacgccaagctgccctccacgctcacgggactctatgtcggcctgctgggccgtgcagccctcgacagcccccccggggccctggcagagctggccaagctggcctgggagctgggccgcagacatcaaagtaccctacaggaggaccagttcccatccgcagacgtgaggacctgggcgatggccaaaggcttagtccaacacccaccgcgggccgcagagtccgagctggccttccccagcttcctcctgcaatgcttcctgggggccctgtggctggctctgagtggcgaaatcaaggacaaggagctcccgcagtacctagcattgaccccaaggaagaagaggccctatgacaactggctggagggcgtgccacgctttctggctgggctgatcttccagcctcccgcccgctgcctgggagccctactcgggccatcggcggctgcctcggtggacaggaagcagaaggtgcttgcgaggtacctgaagcggctgcagccggggacactgcgggcgcggcagctgcttgagctgctgcactgcgcccacgaggccgaggaggctggaatttggcagcacgtggtacaggagctccccggccgcctctcttttctgggcacccgcctcacgcctcctgatgcacatgtactgggcaaggccttggaggcggcgggccaagacttctccctggacctccgcagcactggcatttgcccctctggattggggagcctcgtgggactcagctgtgtcacccgtttcagggctgccttgagcgacacggtggcgctgtgggagtccctgcggcagcatggggagaccaagctacttcaggcagcagaggagaagttcaccatcgagcctttcaaagccaagtccctgaaggatgtggaagacctgggaaagcttgtgcagactcagaggacgagaagttcctcggaagacacagctggggagctccctgctgttcgggacctaaagaaactggagtttgcgctgggccctgtctcaggcccccaggctttccccaaactggtgcggatcctcacggccttttcctccctgcagcatctggacctggatgcgctgagtgagaacaagatcggggacgagggtgtctcgcagctctcagccaccttcccccagctgaagtccttggaaaccctcaatctgtcccagaacaacatcactgacctgggtgcctacaaactcgccgaggccctgccttcgctcgctgcatccctgctcaggctaagcttgtacaataactgcatctgcgacgtgggagccgagagcttggctcgtgtgcttccggacatggtgtccctccgggtgatggacgtccagtacaacaagttcacggctgccggggcccagcagctcgctgccagccttcggaggtgtcctcatgtggagacgctggcgatgtggacgcccaccatcccattcagtgtccaggaacacctgcaacaacaggattcacggatcagcctgagatgatcccagctgtgctctggacaggcatgttctctgaggacactaaccacgctggaccttgaactgggtacttgtggacacagctcttctccaggctgtatcccatgaggcctcagcatcctggcacccggcccctgctggttcagggttggcccctgcccggctgcggaatgaaccacatcttgctctgctgacagacacaggcccggctccaggctcctttagcgcccagttgggtggatgcctggtggcagctgcggtccacccaggagccccgaggccttctctgaaggacattgcggacagccacggccaggccagagggagtgacagaggcagccccattctgcctgcccaggcccctgccaccctggggagaaagtacttctttttttttatttttagacagagtctcactgttgcccaggctggcgtgcagtggtgcgatctgggttcactgcaacctccgcctcttgggttcaagcgattcttctgcttcagcctcccgagtagctgggactacaggcacccaccatcatgtctggctaatttttcatttttagtagagacagggttttgccatgttggccaggctggtctcaaactcttgacctcaggtgatccacccacctcagcctcccaaagtgctggggattacaagcgtgagccactgcaccgggccacagagaaagtacttctccaccctgctctccgaccagacaccttgacagggcacaccgggcactcagaagacactgatgggcaacccccagcctgctaattccccagattgcaacaggctgggcttcagtggcaggctgcttttgtctatgggactcaatgcactgacattgttggccaaagccaaagctaggcctggccagatgcaccaggcccttagcagggaaacagctaatgggacactaatggggcggtgagaggggaacagactggaagcacagcttcatttcctgtgtcttttttcactacattataaatgtctctttaatgtcacaaaaaaaaaaaaaaaaaaaaaaa

SEQ ID NO: 1182 - DNA, 3131 bp, Homo sapiens
tgccagcgggtcgcaccggctagctggctgccagagcctctgaggcagcgcaggggtcagttcccacccccacccgtcccaggcccaggccgaagccagcgcccagctttcctcactgttcctgtggaggatgtctacgcccaggcgagctcctcgacctctgagggaccatctccccgaccactgcccagccctctgctccctccccagaggaggcgggagggtgggctctatattttcattccaaataaaattctctttctaaaagccaggctgacctgctgctgcaagggtggggctgagaagtctggaaacctggagacagaggatgtcacaggagtcacacatgtgcagaaggtctgggggcagtgagcagccccacaggcattgctcccctggattgtcaggcagggaaactgaggcagaagacctgagaacacatgcaaggctgcatccagcttcaagttggtgctgcttcttccttggaggacaggcccggcagcccagcctcctccagagagactggggagggtctggtgtggaccaggggtcctgcagcagggaggggcaggtggggtatgtgggcaggaagcggaagcctgggccacccttcactgcagacgagcactgagctcacttctcgctcgacacagccagagctggaggtgggtgcccggcacggaggggcctgcggaccaatggtaagcctcggagccccccgggttcttgggatgggggccacaggcggtcggggctagaatgtctgggcctgtggagctaaggagggccccacattggccccagggaagaggtgagacctaagaggagtatggcagaggctgaacctttctctcacctgagctgggctccctgggactccaggcctggcccccagcaccccataccggaccaggcccctgtcaggagccctgggaaggcccttacctggtcttcctgtgagcgggaacttgcattcctggagcctgggcggacagcctggggtggtgggggaggctggctgcacctcagcacccctcccccgacaccccccacctagcctgttccgaccgcagacttcctctggcagctgcgcccgcctcccccagccccccccagcccccggccctgcacgcctgtggccctcagggactgggagtggaacggaaaccctgccgctggggcagccccgtggtggggagggaggaagaggggcctcacggacccccgtttggggacctggccaagcagaagatgagcagttgcctctgggtgcatccaggcccctccatcccccatcccaggcctcagggagagccagccctgacaccagctagcaacctccttccctccctcccatctcctctcccacccacccaggcagcctagacacatttaatccatacttattgagcacctactaacatgcttgacccaaaaagcccccgtttcctagcagcttattgtggggggtagataagacaatagacataaaaaatgagtacagttatctcctgcgttaggtgacatggaaggaaaaaggcactgagtgctggggggtgctggggtgggctgcagtgatagacatcagggtagaggttaaggtcaggttcagcctcactggggtgaagtttgagcacggtgagcaggccatgcagcccgggggaggggaggatgggaggaggtggagctttccgggcagagggaacagccagtgcgaaggccccaggcaggtggcttaatgcagctgttgggggaggtgagtggtagggaggaggctggagggatgggggctgatctcacagggccagagcctggttgaccaaataaggccttggccttttctgcttggctgtcccaagaggatcccaaagagaaaaaaacgaaagtggtcttggtcacccagcctgccccacaccaggccccaccccaggtgctgagccctctgagcccctgcctgtctcccacaggctctgccctgcaccttagggctcgggatgctgctggccctgccaggggccttgggctcgggtggcagcgcggaggacagcgtgggctccagctctgtcaccgttgtcctgctgctgctgctgctcctactgctggccactggcctagcactggcctggcgccgcctcagccgtgactcagggggctactaccacccggcccgcctaggtgccgcgctgtggggccgcacgcggcgcctgctctgggccagccccccaggtcgctggctgcaggcccgagctgagctggggtccacagacaatgaccttgagcgacaggaggatgagcaggacacagactatgaccacgtcgcggatggtggcctgcaggctgaccctggggaaggcgagcagcaatgtggagaggcgtccagcccagagcaggtccccgtgcgggctgaggaagccagagacagtgacacggagggcgacctggtcctcggctccccaggaccagcgagcgcagggggcagtgctgaggccctgctgagtgacctgcacgcctttgctggcagcgcagcctgggatgacagcgccagggcagctgggggccagggcctccatgtcaccgcactgtagaggccggtcttggtgtcccatccctgtcacagccgctcactccccgtgcctctgcttcccaagatgccatggctggactggacccccagcccacatgaccatgcctcagactgtcaccccctaccagttcccaagtccatgtgtaccccgctcaccacgggaacggccccccccaaccacaggcatcaggcaaccatttgaaataaaactccttcagcctgtggccctgtggtcctacagagacccctccctcctggaccaggggctcctcctggcacaatccaacccaaccctgcccctaggcatgcagcacaaagagccaggtcagcaccatgattcagccctttaatcttccacgggagcagttgagcgcggggcgtggcgggcggccctccgtgcccatgattcaggggcacagctgccccagcagacacacactttcatacgcactcacaccccacccccagacacacccccaggtctctggaactggcccagggtcctgctgctctcacagccgcaggacagggctcaagggctaccctc

SEQ ID NO: 1183 - DNA, 505 bp, Homo sapiens
atgaaacacctgtggttcttcctcctcctggtggcagctcccagatgtgagtgtctcaggaatgcggatatgaagatatgagatgctgcctctgatcccagggctcactgtgggtttctctgttcacaggggtcctgtcccaggtgcagctacagcagtggggcgcaggactgttgaagccttcggagaccctgtccctcacctgcgctgtctatggtgggtccttcagtggttactactggagctggatccgccagcccccagggaaggggctggagtggattggggaaatcaatcatagtggaagcaccaactacaacccgtccctcaagagtcgagtcaccatatcagtagacacgtccaagaaccagttctccctgaagctgagctctgtgaccgccgcggacacggctgtgtattactgtgcgagagccggggcctaatagtgggagctactactgcttttgatatctggggccaagggacaatggtcaccgtctcctca

SEQ ID NO: 1184 - DNA, 847 bp, Homo sapiens
agtggcttcctaacagcagaagaactaacaatccactgaataaagaaaaagaatgggctcgatggaggaataagaagctagttatagtcatcggtagaattgtgaaaggcgcaatttgattggttaaaattgttctttgacgagccaaccaattagaaaggaaataaggtgaaggctattttacatgtatgcgtcactgacacattgcccaatcagagctggatattttgaattctttatttgcatgaaaggcctataaaaggagagactctagacacgagcttttatttaagtgcgttcattctcactgctgttattgttttctgacagcatgcctgaaccagctaagtcagctcctgctccgaagaagggttccaagaaggctgtgaccaaggcgcagaagaaggatggcaagaagcgcaagcgcagtcgtaaggagagctactccgtgtatgtgtacaaggtgctaaaacaggttcaccccgatactggcatctcatccaaggccatgggcatcatgaattccttcgttaacgacatcttcgaacgcatcgcaggcgaggcttcccgtctggcccactacaacaagcgctcgaccattacctccagggagatccagaccgccgtgcgtctgctgcttcccggagagctggccaagcacgcagtgtccgaaggtaccaaggctgtcaccaagtatacaagctccaagtaaatgtgtgcttaggtgctttaaaactcaaaggctcttttcagagccactcaagtctcacataaagagctttaatattgaatttcaccgttttctagggaataagggaatttttcgattttgtaatcccagcacttt

SEQ ID NO: 1185 - DNA, 1636 bp, Homo sapiens
gaattccggctctctgggtgagagaccgagaggggcatatccgttcacgccgatccatgaaaatgctttggaaattgacggataatatcaagtacgaggactgcgaggaccgtcacgacggcaccagcaacgggacggcacggttgccccagctgggcactgtaggtcaatctccctacacgagcgccccgccgctgtcccacacccccaatgccgacttccagcccccatacttccccccaccctaccagcctatctacccccagtcgcaagatccttactcccacgtcaacgacccctacagcctgaaccccctgcacgcccagccgcagccgcagcacccaggctggcccggccagaggcagagccaggagtctgggctcctgcacacgcaccgggggctgcctcaccagctgtcgggcctggatcctcgcagggactacaggcggcacgaggacctcctgcacggcccacacgcgctcagctcaggactcggagacctctcgatccactccttacctcacgccatcgaggaggtcccgcatgtagaagacccgggtattaacatcccagatcaaactgtaattaagaaaggccccgtgtccctgtccaagtccaacagcaatgccgtctccgccatccctattaacaaggacaacctcttcggcggcgtggtgaaccccaacgaagtcttctgttcagttccgggtcgcctctcgctcctcagctccacctcgaagtacaaggtcacggtggcggaagtgcagcggcggctctcaccacccgagtgtctcaacgcgtcgctgctgggcggagtgctccggagggcgaagtctaaaaatggaggaagatctttaagagaaaaactggacaaaataggattaaatctgcctgcagggagacgtaaagctgccaacgttaccctgctcacatcactagtagagggagaagctgtccacctagccagggactttgggtacgtgtgcgaaaccgaatttcctgccaaagcagtagctgaatttctcaaccgacaacattccgatcccaatgagcaagtgacaagaaaaaacatgctcctggctacaaaacagatatgcaaagagttcaccgacctgctggctcaggaccgatctcccctggggaactcacggcccaaccccatcctggagcccggcatccagagctgcttgacccacttcaacctcatctcccacggcttcggcagccccgcggtgtgtgccgcggtcacggccctgcagaactatctcaccgaggccctcaaggccatggacaaaatgtacctcagcaacaaccccaacagccacacggacaacaacgccaaaagcagtgacaaagaggagaagcacagaaagtgaggctctcctcccgccccgcccctcccacgcctcaccagccccccgcgcgcccaccctccggcgggtgacagctccgggatcagcaacccttcctgctgctgctactgctgctgctgctgccgccgccgccgccgccgctgcccttgggtccccccgagtctccgggactgccctctcgactgtcagtggggcagcctctccgactctgcacccgcctcgacctccccacccgctcccacacccctgtgcccccggaattc

SEQ ID NO: 1186 - DNA, 2262 bp, Homo sapiens
gaattccggcgcgctgcgaccgttggggctttgttcgcgggggtcacagctctcatggctgcagctagcgtgaccccccctggctccctggagttgctacagcccggcttctccaagaccctcctggggaccaagctggaagccaagtacctgtgctccgcctgcagaaacgtcctccgcaggcccttccaggcgcagtgtggccaccggtactgctccttctgcctggccagcatcctcagctctgggcctcagaactgtgctgcctgtgttcacgagggcatatatgaagaaggcatttctattttagaaagcagttcggccttcccagataatgctgcccgcagggaggtggagagcctgccggccgtctgtcccagtgatggatgcacctggaaggggaccctgaaagaatacgagagctgccacgaaggccgctgcccgctcatgctgaccgaatgtcccgcgtgtaaaggcctggtccgccttggtgaaaaggagcgccacctggagcacgagtgcccggagagaagcctgagctgccggcattgccgggcaccctgctgcggagcagacgtgaaggcgcaccacgaggtctgccccaagttccccttaacttgtgacggctgcggcaagaagaagatcccccgggagaagtttcaggaccacgtcaagacttgtggcaagtgtcgagtcccttgcagattccacgccatcggctgcctcgagacggtagagggtgagaaacagcaggagcacgaggtgcagtggctgcgggagcacctggccatgctactgagctcggtgctggaggcaaagcccctcttgggagaccagagccacgcggggtcagagctcctgcagaggtgcgagagcctggagaagaagacggccacttttgagaacattgtctgcgtcctgaaccgggaggtggagagggtggccatgactgccgaggcctgcagccggcagcaccggctggaccaagacaagattgaagccctgagtagcaaggtgcagcagctggagaggagcattggcctcaaggacctggcgatggctgacttggagcagaaggtcaggcccttccaggcgcagtgtggccaccggtactgctccttctgcctggccagcatcctcaggaagctccaggaagctgtggctggccgcatacccgccatcttctccccagccttctacaccagcaggtacggctacaagatgtgtctgcgtatctacctgaacggcgacggcaccgggcgaggaacacacctgtccctcttctttgtggtgatgaagggcccgaatgacgccctgctgcggtggcccttcaaccagaaggtgaccttaatgctgctcgaccagaataaccgggagcacgtgattgacgccttcaggcccgacgtgacttcatcctcttttcagaggccagtcaacgacatgaacatcgcaagcggctgccccctcttctgccccgtctccaagatggaggcaaagaattcctacgtgcgggacgatgccatcttcatcaaggccattgtggacctgacagggctctaactgccccctactggtgtctgggggttgggggcagccaggcacagccggctcacggaggggccaccacgctgggccagggtctcactgtacaagtgggcaggggccccgcttgggcgcttgggagggtgtcggcctgcagccaagttcactgtcacgggggaaggagccaccagccagtcctcagatttcagagactgcggaggggcttggcagacggtcttagccaagggctgtggtggcattggccgagggtcttcgggtgcttcccagcacaagctgcccttgctgtcctgtgcagtgaagggagaggccctgggtgggggacactcagagtgggagcacatcccagcagtgcccatgtagcaggagcacagtggatggccttgtgtccctcgggcatgacaggcagaaacgagggctgctccaggagaagggcctcctgctggccagagcaaggaaggctgagcagcttggttctcccctctggcccctggagagaagggagcattcctagacccctgggtgcttgtctgcacagagctctggtctgtgccaccttggccaggctggctgtgggagggtctggtcccacgccgcctctgctcagacactgtgtgggagggcacagcacagctgcgggtaaagtgtgagagcttgccatccagctcacgaagacagagttattaaaccattacaaatctc

SEQ ID NO: 1187 - DNA, 3683 bp, Homo sapiens
gcgagcgcagcggagcctggagagaaggcgctgggctgcgagggcgcgagggcgcgagggcagggggcaaccggaccccgcccgcacccatggcgcccgtcgccgtctgggccgcgctggccgtcggactggagctctgggctgcggcgcacgccttgcccgcccaggtggcatttacaccctacgccccggagcccgggagcacatgccggctcagagaatactatgaccagacagctcagatgtgctgcagcaaatgctcgccgggccaacatgcaaaagtcttctgtaccaagacctcggacaccgtgtgtgactcctgtgaggacagcacatacacccagctctggaactgggttcccgagtgcttgagctgtggctcccgctgtagctctgaccaggtggaaactcaagcctgcactcgggaacagaaccgcatctgcacctgcaggcccggctggtactgcgcgctgagcaagcaggaggggtgccggctgtgcgcgccgctgcgcaagtgccgcccgggcttcggcgtggccagaccaggaactgaaacatcagacgtggtgtgcaagccctgtgccccggggacgttctccaacacgacttcatccacggatatttgcaggccccaccagatctgtaacgtggtggccatccctgggaatgcaagcatggatgcagtctgcacgtccacgtcccccacccggagtatggccccaggggcagtacacttaccccagccagtgtccacacgatcccaacacacgcagccaactccagaacccagcactgctccaagcacctccttcctgctcccaatgggccccagccccccagctgaagggagcactggcgacttcgctcttccagttggactgattgtgggtgtgacagccttgggtctactaataataggagtggtgaactgtgtcatcatgacccaggtgaaaaagaagcccttgtgcctgcagagagaagccaaggtgcctcacttgcctgccgataaggcccggggtacacagggccccgagcagcagcacctgctgatcacagcgccgagctccagcagcagctccctggagagctcggccagtgcgttggacagaagggcgcccactcggaaccagccacaggcaccaggcgtggaggccagtggggccggggaggcccgggccagcaccgggagctcagattcttcccctggtggccatgggacccaggtcaatgtcacctgcatcgtgaacgtctgtagcagctctgaccacagctcacagtgctcctcccaagccagctccacaatgggagacacagattccagcccctcggagtccccgaaggacgagcaggtccccttctccaaggaggaatgtgcctttcggtcacagctggagacgccagagaccctgctggggagcaccgaagagaagcccctgccccttggagtgcctgatgctgggatgaagcccagttaaccaggccggtgtgggctgtgtcgtagccaaggtgggctgagccctggcaggatgaccctgcgaaggggccctggtccttccaggcccccaccactaggactctgaggctctttctgggccaagttcctctagtgccctccacagccgcagcctccctctgacctgcaggccaagagcagaggcagcgagttggggaaagcctctgctgccatggtgtgtccctctcggaaggctggctgggcatggacgttcggggcatgctggggcaagtccctgactctctgtgacctgccccgcccagctgcacctgccagcctggcttctggagcccttgggttttttgtttgtttgtttgtttgtttgtttgtttctccccctgggctctgcccagctctggcttccagaaaaccccagcatccttttctgcagaggggctttctggagaggagggatgctgcctgagtcacccatgaagacaggacagtgcttcagcctgaggctgagactgcgggatggtcctggggctctgtgtagggaggaggtggcagccctgtagggaacggggtccttcaagttagctcaggaggcttggaaagcatcacctcaggccaggtgcagtggctcacgcctatgatcccagcactttgggaggctgaggcgggtggatcacctgaggttaggagttcgagaccagcctggccaacatggtaaaaccccatctctactaaaaatacagaaattagccgggcgtggtggcgggcacctatagtcccagctactcagaagcctgaggctgggaaatcgtttgaacccgggaagcggaggttgcagggagccgagatcacgccactgcactccagcctgggcgacagagcgagagtctgtctcaaaagaaaaaaaaaaaagcaccgcctccaaatgctaacttgtccttttgtaccatggtgtgaaagtcagatgcccagagggcccaggcaggccaccatattcagtgctgtggcctgggcaagataacgcacttctaactagaaatctgccaattttttaaaaaagtaagtaccactcaggccaacaagccaacgacaaagccaaactctgccagccacatccaaccccccacctgccatttgcaccctccgccttcactccggtgtgcctgcagccccgcgcctccttccttgctgtcctaggccacaccatctcctttcagggaatttcaggaactagagatgactgagtcctcgtagccatctctctactcctacctcagcctagaccctcctcctcccccagaggggtgggttcctcttccccactccccaccttcaattcctgggccccaaacgggctgccctgccactttggtacatggccagtgtgatcccaagtgccagtcttgtgtctgcgtctgtgttgcgtgtcgtgggtgtgtgtagccaaggtcggtaagttgaatggcctgccttgaagccactgaagctgggattcctccccattagagtcagccttccccctcccagggccagggccctgcagaggggaaaccagtgtagccttgcccggattctgggaggaagcaggttgaggggctcctggaaaggctcagtctcaggagcatggggataaaggagaaggcatgaaattgtctagcagagcaggggcagggtgataaattgttgataaattccactggacttgagcttggcagctgaactattggagggtgggagagcccagccattaccatggagacaagaagggttttccaccctggaatcaagatgtcagactggctggctgcagtgacgtgcacctgtactcaggaggctgaggggaggatcactggagcccaggagtttgaggctgcagcgagctatgatcgcgccactacactccagcctgagcaacagagtgagaccctgtctcttaaagaaaaaaaaagtcagactgctgggactggccaggtttctgcccacattggacccacatgaggacatgatggagcgcacctgccccctggtggacagtcctgggagaacctcaggcttccttggcatcacagggcagagccgggaagcgatgaatttggagactctgtggggccttggttcccttgtgtgtgtgtgttgatcccaagacaatgaaagtttgcactgtatgctggacggcattcctgcttatcaataaacctgtttgttttaaaaaaaa

SEQ ID NO: 1188 - DNA, 527 bp, Homo sapiens
ttggggctgtgctgggttttcctcgttgctcttttaagaggtgtccagtgtcaggtgcagctggtggagtctgggggaggcgtggtccagcctgggaggtccctgagactctcctgtgcagtctctggactcacctttagtagctatggtatgcactgggtccgccaggctccaggcaaggggctgcagtgggtggcagctatatcatatgatggaagtaataaatactacgcagactccttgaagggccgattcaccatctccagagacaattccaagaacacgctgtatctgcaaatgaacagcctgagatctgaggacacggctgtgtattactgtgcgagaggggcggggattactgatttttggagtggttattacgtcaactggttcgacccctggggccagggaaccctggtcaccgtctcctcagcttccaccaagggcccatcggtcttccccctggcgccctgctccaggagcacctctgggggcacagcggccctgggctgcctggtcaaggacta

SEQ ID NO: 1189 - DNA, 531 bp, Homo sapiens; identical to SEQ ID NO: 100
  misc_feature: n=a,t,g or c

SEQ ID NO: 1190 - DNA, 448 bp, Homo sapiens; identical to SEQ ID NO: 812
  misc_feature: n=a,t,g or c

SEQ ID NO: 1191 - DNA, 333 bp, Homo sapiens
caactgctaacccccatcctcatatttctgtctgtcccagcacctcaggagcattctcattgtggccggctaactccgcctggatgtgaacaggcaagcacagtgggaaatgagtcacgtacttgtattgcacagtggacacctctagaggtccattggtttaaagggatagggaaggaggagggatgagaccatcaccccctcccagaagtaaatctagtatctgagttttctttatgcccttgagtcaaactaataactgtctagtacggaggtgtttgctggttttcttcggtgttttttctaatgcaataaactcatttctgcctgctg

SEQ ID NO: 1192 - DNA, 567 bp, Homo sapiens; identical to SEQ ID NO: 104
  misc_feature: n=a,t,g or c

SEQ ID NO: 1193 - DNA, 521 bp, Homo sapiens
  misc_feature: n=a,t,g or c
gtaatatggaattagaaacaatttggctttttagagctgaaactagaaacaacacatccaggaacagtagacttctattgtcttcaatccctaatgtcctagtgagtatgtaccctatggagaaggcagaaatgacgtggaccaggactccttacatggagagtgttttaaaggcagtttttaaaaagcccattttgtgaaagaaaccagaaggctcgtaattgctgtctgcactgtggtttctcctgggggttggggaggggagtggattaaataaaaagtttagaaggccatagnataaatatcgaaatagtatgaattttaatatatacttttaaaggggttaggcaatgatgaaaagatatgactgctttcctttcatttctcattaaattaaaattcccacaaaagtgcatggcatctttttgaaacactgctaattttaaagtttgggaaggtttatcttcatagccacaatctttgcnaaagccttggtaccggnaacaaggctccagtctgcc

SEQ ID NO: 1194 - DNA, 265 bp, Homo sapiens
gtggaaatgtaagtcgcttactctacaaattttggtgctggcaaatacataggcaaactgttgggagctgctctagttacattcctcccttcttattccctctttctcttcctcactctattgcataacatattcctgtacccaaagcattctaccacagttctatttgactcccacttgtaataactcctttaaaaattcatgtttaaccatatgaccctgcttgcttactcatattctccctcctctcccttcttctctctct

SEQ ID NO: 1195 - DNA, 269 bp, Homo sapiens
gttaaaacatttttttaaagcagtaagtttatagaaaatgttttcatttaatggaaggctggggaatgtccagcatcaacccctatggcatgcattccagtggccttctcatctgggcctggaacctttgttcagggcttaggggagaacaggccacatggcaacagccacacagtcattgccttcacacagagccacgtgtcccaaacagcatagtcatgccttgtcagctggatctaattgtcatagtcgtgctcctcctgtagact

SEQ ID NO: 1196 - DNA, 518 bp, Homo sapiens
  misc_feature: n=a,t,g or c
actcaatagttgagtttggctgttgttgcaggaaaatgattataactaaaagctctctgatagtgcagagacttaccagaagacacaaggaattgtactgaagagctattacaatccaaatattgccgtttcataaatgtaataagtaatactaattcacagagtattgtaaatggtggatgacaaaagaaaatctgctctgtggaaagaaagaactgtctctaccagggtcaagagcatgaacgcatcaatagaaagaactcggggaaacatcccatcaacaggactacacacttgtatatacattcttggagaacactgcaatgttgaaaatccacgtttgctatttataaacttgtccttagattaatgtgtctggacagattgtgggagtaagtgattcttctaagaattagatacttgtcactgcctatacctgcagctggactgaatgggacttcgtatggttaatagttggttcnggataaatccatgccaattaaaggtaaagtgatgcc

SEQ ID NO: 1197 - DNA, 466 bp, Homo sapiens; identical to SEQ ID NO: 298

SEQ ID NO: 1198 - DNA, 905 bp, Homo sapiens
  misc_feature: n=a,t,g or c
atacactcagtgcagccttaagcaaatgagatcattttcagatttcattttttttttcagtctttctacttttgtaataataggaagttagtaggactcacttctctgattaataagcaatttgcagcacacagcgttccactgcggggtttcacgctcacctgaaaacacctgttcccaacctacttcttggtgcaagttgaccaaatcgttttaagtggtaactttttccaaccgtagcagggttgttttctgttaagcaaagccgagatccagtgcaatacctggactgtcaccgtcctgtgagtggtgtacacaatgggaagataataagccgtggtgttttgctgtctgtctgtgtcacaagcatgaaaacccgtgtgtcattgatcagcaccatttgtggtatgttccgtgatgagcgtttagtgagcctgctggctgcagagcactatgaaatcatggtacgtagtccccggcacctgtcgttattcctatatcctcctgcaactgtggtttgaaactgcgcattctctagtagtatatatcgtgcctgtcttcaaaacatgtccctttttatactcattcccccaggcatggggtagtgctagtcgactgacagggacacgggttcagtggcttggccctatctggaacgctgcctgtacgatngtatgggtgctcaatccgtgttcctagcgtctacgaggctaaacggggatggagttaccacntctagcgcggatgcatcncatgaaaggaagcaccttgtggaccggcacggtactggatcacaagaggtgttattgtaatagagcttatgaaacgccccttgtataaaagattgcggccttgtttgcggtggtggaggattcactgtggcccttgcgaggcgtcccttttta

SEQ ID NO: 1199 - DNA, 468 bp, Homo sapiens
gcgaatactttattatcgagtgactggtattagctttttgtctgggcattaatatctcaaaaaccatacaccaaacccaggcttttccacctagctctgctgtatcattttctttatatatatatataaaaagtaaggaagaggaaggaggaagagaaagaaaatatatctgtattgaaagaattataagccaaagtgcgtctttcttgttttgtccatatacacacattgcaccatacataaatagatacattgtaaaaatgactccataattacaagtataatatatatttccatataatatataaaactttatattaaatctaggtagatgatatctgggggggttttgtccgtgggggctgtgtctctgggcatcggcactctcgaggccggcagtaggcggtggcgcggcctcccacccgctcctcccgccggggcgccactatctggggttgttgaggagat

SEQ ID NO: 1200 - DNA, 423 bp, Homo sapiens; identical to SEQ ID NO: 814

SEQ ID NO: 1201 - DNA, 103 bp, Homo sapiens; identical to SEQ ID NO: 300

SEQ ID NO: 1202 - DNA, 431 bp, Homo sapiens
cagaggctttagaaatttattacaaggccctcatagtagaaataaaaatatagatatctatgcttcccatctcgctctcagtggttcgaataacaagtgcaagtaacaaaatagattgtctctataattcgcaaactgggagttcatgggtacagagcaacttcagccccagctcccaagtcccaaagtgtggtcttgtcgagggtgcagacaaggaccaaccaagttcaaccaagtctctcgtatgcagacgccagctccagtctcaaggagggtggggcttgcagtcagtctcactccacccccgagtggacagtctggaccctccgtgatggggaaggcggcacgtgccccgccactccggcttctgctccatcccaaggcctcagcttcgggggtcctgtctcctgctggcctgggtcccccttctc

SEQ ID NO: 1203 - DNA, 190 bp, Homo sapiens
tttcagactttttggtgctagtatatagaaataccattgatttttgtttattgatcttatatcctgtgacctgtctaaattcaatctgttagttttatcattttttaaaaaaatgtccgtgtgtgtcttccttgagattttctacattatcatgtcatctgcaaataaagacatttacttctttctttcc

SEQ ID NO: 1204 - DNA, 306 bp, Homo sapiens
  misc_feature: n=a,t,g or c
ggcccacaagggtgcccacctcttgttttccccttttaaaaactcagatttttaaaagccctttccaaaggtttcaactgtaaaatacttctttttacaatgtatcaacatatttttatttaaggggaattaacaattgccagggaaaccagccaacccaagtttattatatcattaaccttatcataaattcaaacctaagttgctggaccctggtgtgaggncataaatcttccaaagttttgcctatcctaagagctgcatttttctactgctctttaccttgcattttagctaatttaggag

SEQ ID NO: 1205 - DNA, 490 bp, Homo sapiens
gaaggtcctccctaagagtctcctgacaaaagtatacttattgaacacctctatgtgccaggctctgtgttgggtactttgatcaatgcccctgtttcagtctcatctgtactcacggcagccctgtggagtacggtgtactggcccagcttacagatgcagaaagcgagacgttctgccatcagataaagtcacgtggctctttagtaacacggacaaggctcctcgccaaggaactcgtggcagaagagggcagcagttggcagtagctgccgatgtctgtccccagctccaccattcctccctgtggctgtgcatgctcgtggtttcagtgtccgtgtgtccatgtgtctgcccttcaggagctcgcagctggtgtgcttggcggtcccaggcctgtgtagtgtctctcccctgctgcgggcgcccccaccccgattcctctccccagaagcggtgggatgggccccatgaactgcagcagcatgct

SEQ ID NO: 1206 - DNA, 319 bp, Homo sapiens
aagcattacagacagatggagccatctatccaagaagccttcactcaccttcactgctgctgttgcaactcggctgttctggactctgatgtgtgtggagggatggggaatagaacattgactgtgttgattaccttcactattcggccagcctgaccttttaataactttgtaaaaagcatgtatgtatttatagtgttttagatttttctaacttttatatcttaaaagcagacacctgtttaagcattgtacccctattgttaaagatttgtgtcctctcattccctctcttcctcttgtaagtgcccttctaata

SEQ ID NO: 1207 - DNA, 487 bp, Homo sapiens
cggaagggacagtatcgtttgtttatgaaatgccactgggacagctggctgggccttcaccaagcaagtcccttcagactggcccttaagccaaactcaggcccagaattgcagttcagaatggcagtcctggaggcagggggtgaggggcaggtctagtgttcctgcaccaaacctaagtccttccacctgccacccccttccctgggagggaggtggtcctcctatctccctggctcactggcaggtgtgggatctggggagagcggctggagaaagatgcagtcctcaggaagggggccgccaccctcccctatgctggtagatgctgaggcccctaggtgcccagggccagtgggaccctctcagaaccaaatctttcccctttctcggggcttggggctcgggccgtaggggctcctgagtgtcatgaagtgcacaggagccaaatgaccgagccctggagagccccatggtgggtaggtgg

SEQ ID NO: 1208 - DNA, 342 bp, Homo sapiens; identical to SEQ ID NO: 159

SEQ ID NO: 1209 - DNA, 232 bp, Homo sapiens
ttaattcaaaacatgttaaacgttactttcatgtactatggaaaagtacaagtaggtttacattactgatttccagaagtaagtagtttcccctttcctagtcttctgtgtatgtgatgttgttaatttcttttattgcattataaaataaaaggattatgtatttttaactaaggtgagacattgatatatccttttgctacaagctatagctaatgtgctgagcttgtgc

SEQ ID NO: 1210 - DNA, 409 bp, Homo sapiens
gggtttctttgtacttgttaaaccacatttgaggtttatggtaaaaatcatcttttgagtttgctctttggtttttcttcattccttttgaggattgggaaaacagaaagattctttgatttgggtaatgaagaggtaatttgggacagtgtggtggtacaggaagaaagaggattggaaaggccagtactgttttagttgctcggcactgttggttttgttttaatgtggttgccctgtccactacatggttctatcagtagtgtaatccattttcaatgtaaagctcttttagtttttgtcatagacataaattaatattttgagaggcatccctcacctgttcatttcttctgtgttgaaatgaagtacttaaaattaccgttatacatgaactttgtggactgta

SEQ ID NO: 1211 - DNA, 586 bp, Homo sapiens; identical to SEQ ID NO: 164

SEQ ID NO: 1212 - DNA, 335 bp, Homo sapiens; identical to SEQ ID NO: 306

SEQ ID NO: 1213 - DNA, 190 bp, Homo sapiens; identical to SEQ ID NO: 170

SEQ ID NO: 1214 - DNA, 369 bp, Homo sapiens
ggtccctcagcaaccccaggcgtgggtttgaggagacaggtgatttacatcccctttgctgtcctcccccggtaccaaggcagggagcctccggagaccggccctgctggccacgcaggggcagactccagcctgtttccccagccctgcaggtcttccttctgtgggaagcttcctagcaagatggcttggagtcctggtccccctcctccctggccctctcgttcgtttctgtttctgtttacacgttggagtggggtcctccgtgggcggcggcgccctgccccgggtgtcgtccggcctcttgtgctcgagcccctttccgagttggactcgaccatccctcaccccaccaaggaccacactgtg

SEQ ID NO: 1215 - DNA, 6823 bp, Homo sapiens
ggcggacaaaacgccaggcggatctcagaaggccagttcaaagacgagatcatcagatgttcattcatctggatcttcagatgcacatatggatgcatctggaccctcagatagtgatatgccaagtcggacacgacctaagagcccaagaaaacataattataggaatgaaagtgcccgtgaaagcctttgtgattctcctcatcagaatctctcaagacctcttctggaaaacaaacttaaagcattcagtattggaaaaatgagtacagctaagcgaactttaagtaaaaaggaacaggaagaattaaagaaaaaggaggatgaaaaggcagctgctgagatttatgaggagtttcttgctgcttttgaaggaagtgatggtaataaagtgaaaacatttgtgcgagggggtgttgttaatgcagctaaagaagaacatgaaacagatgaaaaaagaggtaaaatctataagccatcttcaagatttgcagatcaaaaaaatcctccaaatcagtcttccaatgaaagaccaccatctcttcttgtgatagaaaccaaaaaacctccacttaaaaaaggagagaaagaaaagaaaaaaagcaatttggaactcttcaaagaagaattaaagcaaattcaagaggaacgtgatgagagacataaaacaaaaggcagattaagtcgatttgaacctcctcagtcagattctgatggtcagcgtcgttctatggacgcgccttcaagaagaaatagatcatctggtgttcttgatgattacgcacctggctcacatgatgtaggagatccaagcactactaatttataccttggaaacattaatccacagatgaatgaagaaatgctgtgccaagaatttggaagatttggaccgttagccagtgtgaaaatcatgtggcctagaactgatgaagaaagagccagagagagaaattgcggctttgtggcctttatgaatagaagagatgctgaaagagctttaaaaaatttgaatggaaaaatgattatgtcttttgaaatgaagttaggttggggtaaagctgtacctattcctccacatccaatatacattccgccttctatgatggaacatacgcttcccccacctccatccggactgccttttaatgcgcagcctagagagcggttaaaaaaccctaatgctcctatgttaccgccacctaaaaacaaagaggattttgagaagactctgtcgcaagccatagtcaaagtggttatcccaacagaaaggaatttgctcgccctgatacatcgaatgatagagtttgttgtacgtgaagggccaatgtttgaagctatgattatgaacagagaaatcaacaatcctatgttcaggttcttatttgaaaaccagacaccagcccatgtttactataggtggaagctttattctattctgcagggagattctccaactaaatggcggacggaagattttcgtatgttcaaaaatggatctttttggaggccaccaccattaaatccgtacttgcatggaatgtcagaagagcaagaaacagaagcttttgtagaggaacctagtaaaaagggagcacttaaggaagaacagagggataaattggaagaaatcttgcggggattaactccaaggaaaaatgatattggagatgcaatggttttctgtcttaataatgctgaagctgctgaagaaatagtggattgcattactgagtcgttgtccatcttaaagacaccccttcctaaaaagattgccagattatatttggtttctgatgttttgtacaactcttcagccaaagttgctaatgcttcatattatagaaaattttttgaaacaaagttatgtcagatattttcagacctcaatgccacctatcgtacaattcaaggccatttacaatctgaaaactttaagcaacgggtaatgacttgcttcagagcatgggaagattgggcaatttatccagaaccatttttgatcaaactacaaaatattttcttaggacttgtaaatattattgaagaaaaggaaacagaggatgttccagatgaccttgatggtgcccccatcgaggaagagcttgatggtgcacctctggaagatgtagatggaattcctattgatgctactcccatcgatgatcttgatggagtccctataaaaagtcttgatgatgatcttgatggagtgcctttggatgcaactgaagactcaaaaaagaatgagcctatatttaaagttgccccatcaaaatgggaagctgtggatgaatctgaattggaagcacaggctgttacaacttctaaatgggaattatttgaccagcatgaagaatcagaagaagaagaaaatcaaaatcaagaagaagaaagtgaagatgaagaagatactcaaagttccaaatctgaagaacatcatttgtactctaatccaatcaaagaagaaatgactgagtctaagttctctaagtactctgaaatgagtgaggaaaaacgagccaaacttcgtgaaattgagctcaaagttatgaagtttcaggatgaattggaatctgggaaaagacctaaaaaaccaggccagagttttcaggagcaagtagaacactacagagataaacttcttcaacgagagaaagagaaagagttagaaagagaacgagaaagagacaagaaagataaagaaaaattggaatctcgctccaaagacaagaaggaaaaagatgagtgtactccgacaaggaaggaaaggaagaggcgacacagtacatcccccagcccatctcgcagtagcagtggtagacgagtgaaatccccatcaccaaaatcggagcgatcagagcgttcagaaagatctcataaagagagctcacggtccaggtcatctcacaaagattctcctagagatgttagcaaaaaagccaaaagatcaccatctggttcaaggacacctaaaaggtctaggcgatcacggtctagatctcctaaaaaatcaggaaagaagtccagatcccagtccagatctccacacaggtctcataaaaagtcaaagaaaaacaaacactgacgtaaatttttaagatgctgtcacttattggaaatgcgatttgttttgtgcctgaacggtctgttttttaaaaaaacaaaaaatcaaatgaaagagcattcctggggttttttgtttgtttgtgtatgcatgtgtaaactcatgagcaactgcatctgtagatctgtcattgttttatattgtgtaaattactttcattgtggctatttctcaagatgaaatttttattgttctaatggatttcatcagaaatgtgtataatggatctgctgacagtagtagtattttgttttaggatgttgtgacttagcaaaaataatacagatgtcttccccccttttgtagctttgacaatttgaattagatttcaaataaaatctgaacagaaaactataatgttgtttttttgccccaccggtgatattaagtcccttaaagtcctactgagtttcacactactgttgtgcttcttatacctgatgcactttataagccccagtgttcaagtagcttaagttttatatttactaagatgactatccaaattaagggacctgagactcctatttggtggtttgctaaccatttgcttttgataagtttctcttgggtaatactaatacccagatatcaaagactaggtagatatggcatggcgttttgttagtggaatgcctggctaaaacatttttttcacagaagcaatatgatttccatacatccaacccatgttctgagcaactacttacttttagggggaaattaaatatcttttcatttcctcttctattatgaaagaagtttatttgtaaaacaaattttctaacaaggtttggccatagaattctcttgtatgattgttgaccttttataatcttctgtaggctatctttcaaacactggcatcagaatattttttataagtttgtgtttaaacagcttagttggtccccccccccactcccaagagacttgggtttagttatagctttaagtaaaatttaaaaataaaatgtttttcaggaaacttcgtatctaatggtttgtaaattcaaggtgcaaaaagttgatttaaaccatttgcagagttgaactctattatgaaaataaatttgctacggtatgaggaagaaataaaacttgtgtaatgttggtcataatactgctataaatataataaagggttatgtagaattgaactgacactattatttgtgaatcttgatttcagttttttatgtaggcacttcatacactggtttgatgggttttttttttcctccctaaaagagaaagtagaaaactattctaacaatggattattttgatttagcttgctttttaaaaaaatcttttcaacttgttttacttaatcttgcctagtcacaaaataagatgtgcacccatggtttggagagttcctatattagctgagcagtgagatacactatttccaaacggtgcacacctacagtagctttggaaatgagccaatcactgttttacttaatggttcttatcagcatgcaaatattgcttgaaagttatttccttattcactgttttgttagtccattttgttaggaaacattaattcctaaaaatttgttcagaataattaaaagtgaacatttggtgctgatactcaaaaacctacaaatgtagccatttaaaaagtaacatgtttttctcccctgctcattgcctgggagaatggaattttatataactacctttctttgcaaaaataacggtcgtgtcgagttggtggtgattttggcattccatcttgcactggtttctagtataggcttagaaataattggtcaggtaataatctttccagtcaagttgcaagggatgcttatttctcttcaaaaaaagacatcctgcgggattgagtagaaaattttaggtcagttttgggtgcttatttgtaatatttttcctactacattggagtttagcagttctttttttctggatccagatacaagtgtcatggtttatcttacagtgggtgaaactgactttcttttggttgggtgggtgaggatttcttaggcctgatagaatatatattctgtgaagtttgttaatgtacatattagattgtattggatttttttttcttgaattgcaaatggtattattagataggttatttccagttttacttcatgacaaattacctagagtaaacctacttaatactccaatggattctatgaaagtttaatgggatcagaaattggtgacttataagggggaagatattctaccatatttttataatagcttattattcatgtttcttgtctgaaggacactcaagttacagagcaaaatttctataggttgactagaatgttcataagcatggtcttccagttgcaggaaagatcatgttctatctgtggacacttactgtcctctaccacagctacgtgccagagttgttttccacagttcttataaagggcatgacttaggctctttaccctccaacttaatgtttatacacagggattgtttactaggttaatgacatttaactcccctctcttctgtaggtgagagaaaataagtaagtcttgatctgtttcttaccaaagagagacagacctatgatggaaaatgatcacgtctctgaattttttctttaacgttatagttccttattacagatagtaagcatatgggaatttctgagctataacatgttgagaagttagaaattaaaactaacacaacaaaaggcgctgaatcaaaagatctttgcttttatttggctcagaatgtttttggcttttctgctaaagatggcagaaattactctacacagacctgatttttctttattgcagaccattcttgtgggcttaccctgagacttttatcccaattagtgaatcttggagggaatacttgcttatttatgacttaggtatttccccccaaactttaatattcttgagcacttgaaaatacttttgagaaattttaactgtgattaaatttaggtttattagaaatattctgtacacatttgcctccatggtggtgtaagttctgaaaaattatatgaccgtgacaatagtttatcatcatcattattgttattcaaaataagggtaaataaatctctgtattgccaaagtgacttaaactgttctgatgaccacacagtgtgatttctttagcagagaaagttggttttaaaaataaatagtaccacttttctaagactgtacagtttacaaataaggtttttttctttgttgttttcctcttctattaagttttagtgaaaagcctaattacagaaaattgtgcagatactagtgaagatactagtataagtttaaaggaacatgtgactgtaaaatctcacatttacaaagtgcttgatctcttcatatttcacacgcatgttttagaatagattttagggagtgtttaattcattatccttttgacttaaaatttttgttaccaacttcctaggacttagataatatataaataagtacaaatcccaggggaagtgttgtgatgctagactaaaaggtgggaatgtgctgctgttccgtgagccttgttccattgttgaaaatttgatgcctcagtgtttattcagtaccacctcatggagcttcaatgtaaatggattatatgtataattggtaatttgtatagttttgtagattgtagattaaatgcactcatcatgtc

SEQ ID NO: 1216 - DNA, 6289 bp, Homo sapiens; identical to SEQ ID NO: 819

SEQ ID NO: 1217 - DNA, 6651 bp, Homo sapiens; identical to SEQ ID NO: 178

SEQ ID NO: 1218 - DNA, 393 bp, Homo sapiens; identical to SEQ ID NO: 180
  misc_feature: n=a,t,g or c

SEQ ID NO: 1219 - DNA, 456 bp, Homo sapiens
aagaaaaagaagaaagacacaaagaaaataatctaaacaccaaaaactaaacacaattccaatcctttttctgtacctcacgcgcataaatttgctgctcctatttttttttctgtttatgtgtttttatggatctaagttaaatcttttggcaatatataaaaatgtaaatagtaaactttatttattaagaatgtcatcttttttaatttatatttacacaattgttcatctaatttattttttctatacagttttaaatactcagacatattttgctgttcatgatatttttatcctgttctcatggatttgttttcccatactgttttctctgatctcaattacaggttggatctcacaaataataatgtcagagacagaaatattttgccactgttgattactatactttaaagttctatattatgaaaatatataatagcttgtacgctt

SEQ ID NO: 1220 - DNA, 400 bp, Homo sapiens
attcttcaggccaatactatccagactatataaatttataavataaattgaaaaattcattcccctgtattcaagaccaaagcacataaatgctaatgtagggctcagaggggaaatacagttctcctgcatatttgagaaaatgtgaagtcctttcaagaaaatctaataaacataataatcatagcctgctgacactaaggaaaaaggacctcattcactctttcttttatgcagtgatttactggtccctactgatttccaaattggvtcacgrtagtaaattatccatgctggtacctgtgaaagtaagccctgggmtccatatttgtbttgtgttctgcttaaatcagcaagaatgataaatttgatggtgtgaaattggaagtatcaagggctt

SEQ ID NO: 1221 - DNA, 460 bp, Homo sapiens; identical to SEQ ID NO: 191

SEQ ID NO: 1222 - DNA, 433 bp, Homo sapiens
  misc_feature: n=a,t,g or c
tgaatattattcaattgaaaccaaagaaatntcatgtagtttacatctcaagactcaattctctaaactaaatatcttgaatttaaaatttacttcacaaatgaaaggggcttagcttttccagcacagtgtttggcaaagtcaggcttttcatggagttctggttgaggagtccaaatttggctctgtggctgactgcagaatgacttgtcatcccaggtccttaaacatgccattttgcctctaggtcattgattttccaatcataaaataaggagactaacatttccttgtgtgtgtgtgagatcgtaggcacctgtaatgacgtctatgccttccataaccgacacaccatccaccccaaacattaggaaaatggcatgcggttggggaaaaaattgtgagctttacatcaactaaanttggaggnggg

SEQ ID NO: 1223 - DNA, 2620 bp, Homo sapiens
ggggccagctgcagcctcagccccacaagtcttgcagaaacagtccattgtgaccttcagcctgtgggccccgagaggggcgaggtgacatataccactagccaggtctcgaagggctgcgtggctcaggcccccaatgccatccttgaagtccatgtcctcttcctggagttcccaacgggcccgtcacagctggagctgactctccaggcatccaagcaaaatggcacctggccccgagaggtgcttctggtcctcagtgtaaacagcagtgtcttcctgcatctccaggccctgggaatcccactgcacttggcctacaattccagcctggtcaccttccaagagcccccgggggtcaacaccacagagctgccatccttccccaagacccagatccttgagtgggcagctgagaggggccccatcacctctgctgctgagctgaatgacccccagagcatcctcctccgactgggccaagcccaggggtcactgtccttctgcatgctggaagccagccaggacatgggccgcacgctcgagtggcggccgcgtactccagccttggtccggggctgccacttggaaggcgtggccggccacaaggaggcgcacatcctgagggtcctgccgggccactcggccgggccccggacggtgacggtgaaggtggaactgagctgcgcacccggggatctcgatgccgtcctcatcctgcagggtcccccctacgtgtcctggctcatcgacgccaaccacaacatgcagatctggaccactggagaatactccttcaagatctttccagagaaaaacattcgtggcttcaagctcccagacacacctcaaggcctcctgggggaggcccggatgctcaatgccagcattgtggcatccttcgtggagctaccgctggccagcattgtctcacttcatgcctccagctgcggtggtaggctgcagacctcacccgcaccgatccagaccactcctcccaaggacacttgtagcccggagctgctcatgtccttgatccagacaaagtgtgccgacgacgccatgaccctggtactaaagaaagagcttgttgcgcatttgaagtgcaccatcacgggcctgaccttctgggaccccagctgtgaggcagaggacaggggtgacaagtttgtcttgcgcagtgcttactccagctgtggcatgcaggtgtcagcaagtatgatcagcaatgaggcggtggtcaatatcctgtcgagctcatcaccacagcggaaaaaggtgcactgcctcaacatggacagcctctctttccagctgggcctctacctcagcccacacttcctccaggcctccaacaccatcgagccggggcagcagagctttgtgcaggtcagagtgtccccatccgtctccgagttcctgctccagttagacagctgccacctggacttggggcctgagggaggcaccgtggaactcatccagggccgggcggccaagggcaactgtgtgagcctgctgtccccaagccccgagggtgacccgcgcttcagcttcctcctccacttctacacagtacccatacccaaaaccggcaccctcagctgcacggtagccctgcgtcccaagaccgggtctcaagaccaggaagtccataggactgtcttcatgcgcttgaacatcatcagccctgacctgtctggttgcacaagcaaaggcctcgtcctgcccgccgtgctgggcatcacctttggtgccttcctcatcggggccctgctcactgctgcactctggtacatctactcgcacacgcgttcccccagcaagcgggagcccgtggtggcggtggctgccccggcctcctcggagagcagcagcaccaaccacagcatcgggagcacccagagcaccccctgctccaccagcagcatggcatagccccggccccccgcgctcgcccagcaggagagactgagcagccgccagctgggagcactggtgtgaactcaccctgggagccagtcctccactcgacccagaatggagcctgctctccgcgcctacccttcccgcctccctctcagaggcctgctgccagtgcagccactggcttggaacaccttggggtccctccaccccacagaaccttcaacccagtgggtctgggatatggctgcccaggagacagaccacttgccacgctgttgtaaaaacccaagtccctgtcatttgaacctggatccagcactggtgaactgagctgggcaggaagggagaacttgaaacagattcaggccagcccagccaggccaacagcacctccccgctgggaagagaagagggcccagcccagagccacctggatctatccctgcggcctccacacctgaacttgcctaactaactggcaggggagacaggagcctagcggagcccagcctgggagcccagagggtggcaagaacagtgggcgttgggagcctagctcctgccacatggagccccctctgccggtcgggcagccagcagagggggagtagccaagctgcttgtcctgggcctgcccctgtgtattcaccaccaataaatcagaccatgaaaccagtgaaaaaaaaaaaaa

SEQ ID NO: 1224 - DNA, 3150 bp, Homo sapiens
ttcaacctggacgtggaaaagctcgcagtgtacagcggccccaagggcagctacttcggctacgccgtggacttccacatacccgacgcccgcacagcgagtgtcttggtgggggcgcccaaagccaacaccagccagcccgatatcgtggaagggggagccgtctattactgtccttggcccgcggaggggtctgcgcagtgcaggcagataccgtttgacaccaccaacaacagaaagatcagagttaatggaaccaaagaacctatcgagttcaaatccaatcagtggtttggagcaacagtgaaagctcacaaaggaaaagttgtggcctgtgctcctttatatcactggagaactcttaaaccgacaccagaaaaaggaccagttggcacctgctatgtagcaattcagaacttcagcgcttatgccgagttctctccttgcggaaacagcaatgctgatccggaaggccagggttactgccaagcaggatttagtctggatttttataagaatggagaccttattgtgggaggacctgggagtttctactggcaaggacaagtgatcactgccagtgttgcagatatcattgcaaattactcattcaaggatatcctcaggaaactggcaggagaaaagcagacggaagtggctccagcttcctatgatgacagttaccttggatactcagttgctgctggggagtttactggggattctcagcaagaattggttgctggaattccaagaggagcacagaattttggatatgtttccatcattaactcctacgatatgacgtttattcagaatttcacgggagaacagatggcatcttattttggatataccgttgtcgtatcagatgttaacagtgatggactggatgatgtcctggttggggcacctctctttatggaacgtgaatttgagagcaaccccagagaagtagggcaaatctacctgtatttgcaagtgagctctctcctcttcagagacccccagatcctcactggcaccgagacgtttgggagattcggtagtgctatggcacacttaggagacctgaaccaagatggctacaatgacattgccatcggagtgccttttgcaggcaaggatcaaagaggcaaagtgctcatttataatgggaacaaagatggcttaaacaccaagccttcccaagttctgcaaggagtgtgggcctcacatgctgtcccttccggatttggctttactttaagaggagattcagacatagacaagaatgattacccagatttgattgtgggtgcatttggaacaggaaaagtcgctgtttacagagcaagaccggttgtgactgtagatgcccagcttctgctgcacccaatgattatcaatcttgaaaataaaacttgccaggttccagactctatgacatctgctgcctgcttttctttaagagtatgtgcatctgtcacaggccagagcattgcaaacacaatagtcttgatggcagaggtgcaattagattccctgaaacagaaaggagctattaaacggacgctcttccttgataaccatcaggctcatcgcgtcttccctcttgtgataaaaaggcagaaatcccaccagtgccaggatttcatcgtttaccttcgagatgaaactgaattccgagataaattatctccaatcaacattagtttgaattacagtttggacgaatccacctttaaagaaggcctggaagtgaaaccaatattgaactactacagagaaaacattgttagtgaacaggctcacattctggtggactgtggagaagacaatctgtgtgttcctgacttgaagctgtcggctagaccagataagcatcaggtaatcattggagatgaaaatcaccttatgctcataataaatgcaagaaatgaaggggaaggagcatatgaagctgaactctttgtaatgataccagaagaggcagattatgttggaatcgaacgcaacaacaagggatttcgaccactgagctgtgagtacaagatggaaaatgtaaccaggatggtggtgtgtgaccttgggaaccctatggtgtctggaacaaattattccctgggcctccgatttgcagttccacgtcttgagaaaacaaacatgagcattaacttcgatctccaaatcagaagttccaacaaggacaatccagacagcaattttgtgagcctgcaaatcaacatcactgctgtagcgcaggtggaaataagaggagtgtcacaccctccgcagattgttctgcccattcataactgggaaccagaagaggagccccacaaagaggaggaggttggaccattggtggaacatatttatgagctgcacaatattggaccaagtaccatcagtgacaccatcctggaggtgggctggcctttctctgcccgggatgaatttcttctctatattttccatattcaaactctgggacctctgcagtgccaaccaaatcctaatatcaatccacaggatataaagcctgctgcctccccagaggacacccctgagctcagcgcctttttgcgaaactctactattcctcatcttgtcaggaagagggatgtacatgtggtcgaattccacagacagagccctgcaaaaatactgaattgtacaaatatcgagtgtttacaaatctcctgtgcagtgggacgactcgaaggaggagaaagcgcagtcctgaaagtcaggtcacgattatgggcccacaccttcctccagagaaaaaatgatccctatgctcttgcatccctggtgtcctttgaagttaagaagatgccttatacagatcagccagcaaaactcccagaaggaagcatagcaattaagacatcagttatttgggcaactccgaatgtttccttctcaatcccattatgggtaataatactagcaatacttcttggattgttggttctcgccattttaaccttagctttatggaagtgtggattctttgacagagccagacctcctcaggaggacatgaccgacagggaacagctgacaaatgacaagacccctgaggcatgacaagaaaaaaaaaagaagaccaaagacctgaaacactggtcctgttcaaagaaaaagaaagaacatgaggcc

SEQ ID NO: 1225 - DNA, 562 bp, Homo sapiens; identical to SEQ ID NO: 216

SEQ ID NO: 1226 - DNA, 2907 bp, Homo sapiens; identical to SEQ ID NO: 318

SEQ ID NO: 1227 - DNA, 2867 bp, Homo sapiens
ttttcggctgcttggtaacgggctgccagaagagagaggcagagagcagggcagcggcttcttgacgtcagggccaagcgaggggatgcgcgccagcaacccccagctctccccagagaggggccggccgaggctggagcggagcctgacgccaggcgcccgcggagcgtgagtagggggcgcgggagccggtcagctggggcgcagcatgccctctgctcccgcgccatggagatcgccctggtgcccctggagaacggcggtgccatgaccgtcagaggaggcgatgaggcccgggcaggctgcggccaggccacagggggagagctccagtgtcccccgacggctgggctcagcgatgggcccaaggagccggcgccaaaggggcgcggcgcgcagagagacgcggactcgggagtgcggcccttgcctccgctgccggacccgggagtgcggcccttgcctccgctgccagaggagctgccacggcctcgacggccgcctcccgaggacgaggaggaagaaggcgatcccggcctgggcacggtggaggaccaggctctgggcacggcgtccctgcaccaccagcgcgtccacatcaacatctccggcctgcgctttgagacgcagctgggcacccaggcgcagttccccaacacactcctgggggaccccgccaagcgcctgccgtacttcgaccccctgaggaacgagtacttcttcgaccgcaaccggcccagcttcgacggtatcctctactactaccagtccgggggccgcctgcggaggccggtcaacgtctccctggacgtgttcgcggacgagatacgcttctaccagctgggggacgaggccatggagcgcttcggcgaggatgagggcttcattaaagaagaggagaagcccctcgtccgcaacgagttccagcgccaggtgtggcttatcttcgagtatccggagagctctgggtccgcgcgggccatcgccatcgtctcggtcttggttatcctcatctccatcatcaccttctgcttggagaccctgcctgagttcagggatgaacgtgagctgctccgccaccctccggcgccccaccagcctcccgcgcccgcccctggggccaacggcagcggggtcatggccccgccctctggccctacggtggcaccgctcctgcccaggaccctggccgaccccttcttcatcgtggagaccacgtgcgtcatctggttcaccttcgagctgctcgtgcgcttcttcgcctgccccagcaaggcagggttctcccggaacatcatgaacatcatcgatgtggtggccatcttcccctacttcatcaccctgggcaccgaactggcagagcagcagccagggggcggaggaggcggccagaatgggcagcaggccatgtccctggccatcctccgagtcatccgcctggtccgggtgttccgcatcttcaagctctcccgccactccaaggggctgcagatcctgggcaagaccttgcaggcctccatgagggagctggggctgctcatcttcttcctcttcatcggggtcatcctcttctccagtgccgtctacttcgcagaggctgacaaccagggaacccatttctctagcatccctgacgccttctggtgggcagtggtcaccatgaccactgtgggctacggggacatgaggcccatcactgttgggggcaagatcgtgggctcgctgtgtgccatcgccggggtcctcaccattgccctgcctgtgcccgtcatcgtctccaacttcaactacttctaccaccgggaaacggatcacgaggagccggcagtccttaaggaagagcagggcactcagagccaggggccggggctggacagaggagtccagcggaaggtcagcgggagcaggggatccttctgcaaggctggggggaccctggagaatgcagacagtgcccgaaggggcagctgccccctagagaagtgtaacgtcaaggccaagagcaacgtggacttgcggaggtccctttatgccctctgcctggacaccagccgggaaacagatttgtgaaaggagattcaggcagactggcagactggtggcagtggagtagggaatgggaggcttgctgaacatggatatctacattataccgcagagtattgagtcacactgtaacctcagtctacccctctccttcactcctttcctccctccctcggatccccccattttctctattctttccatgaacacccaagggtcgcctaatttttaaaaagtaccacattccatgacgcaggagctgtggaaatggtgagcgctgtgagatggatgtatttgtagccagtctcctatacccagcagagggataacccaaacaaaaatgactctaaatagcccagatcccaagagattatgtaactcctccatccatgtgttccaaatttgctttacatatgattgtatttgtgtataggggaaaatattatttttatgcctggtaagtggctttttgtactgtagtcagatagagatatttggtatatttcaagatacatgttgtatttatggaagaatgtgttggtcctgatggtttttctgtgttactatattagagtcagagatcttggtatgggctgttctgtttcctgtgtctccaagcctctgtcttttctgggatgtggtattggtgctttgtgtctagggcagagtatgttcttgaagaaaggcaaatctgactttttctgtgcgccttaaacaattcttgtaactttcttcaaaaagcattttaatgatattggaggaatacttctgataatttattgtctttatttttatcccaggaaataaaaggttaccttgtt

SEQ ID NO: 1228 - DNA, 950 bp, Homo sapiens
ttcaaatgaagtaaatgggaaaatggagcattgttgagtccagggagctataatttaaaccccatatatctaaaaggggtaacatttttgtgtgtgtgaaattggtgtcattcgcactgcatctacagttttctttttccttctcttccagcacccctggctacatatttgggaaacgcatcatactcttcctgttcctcatgtccgttgctggcatattcaactattacctcatcttctttttcggaagtgactttgaaaactacataaagacgatctccaccaccatctcccctctacttctcattccctaactctctgctgaatatggggttggtgttctcatctaatcaatacctacaagtcatcataattcagctcttgagagcattctgctcttctttagatggctgtaaatctattggccatctgggcttcacagcttgagttaaccttgcttttccgggaacaaaatgatgtcatgtcagctccgccccttgaacatgaccgtggccccaaatttgctattcccatgcattttgtttgtttcttcacttatcctgttctctgaagatgttttgtgaccaggtttgtgttttcttaaaataaaatgcagagacatgttttaagctgatagttgaggggttttgttaatggcttttgggggatttatctctatacccacaaacgactagtttgttttcctcaaactaaatgataatattaaaaatacacatcctggccaggtgtggtggctcatacctgtaatcccagcactttgggaggccgaggcaggtggatcacttgaggtcaggaattaagaccagcctggccaatatggtgaaagcctgtctgtactaaaaatacaaaaattagccaggtatgctggtggatgcttataatcccagctacttgggaggttgaggcaggagaattgcttgaacccggga

SEQ ID NO: 1229 - DNA, 1105 bp, Homo sapiens
gctcggtgcgcgaccccggctcagaggactctttgctgtcccgcaagatgcggatgctgctggcgctcctggccctctccgcggcgcggccatcggccagtgcagagtcacactggtgctacgaggttcaagccgagtcctccaactacccctgcttggtgccagtcaagtggggtggaaactgccagaaggaccgccagtcccccatcaacatcgtcaccaccaaggcaaaggtggacaaaaaactgggacgcttcttcttctctggctacgataagaagcaaacgtggactgtccaaaataacgggcactcagtgatgatgttgctggagaacaaggccagcatttctggaggaggactgcctgccccataccaggccaaacagttgcacctgcactggtccgacttgccatataagggctcggagcacagcctcgatggggagcactttgccatggagatgcacatagtacatgagaaagagaaggggacatcgaggaatgtgaaagaggcccaggaccctgaagacgaaattgcggtgctggcctttctggtggaggctggaacccaggtgaacgagggcttccagccactggtggaggcactgtctaatatccccaaacctgagatgagcactacgatggcagagagcagcctgttggacctgctccccaaggaggagaaactgaggcactacttccgctacctgggctcactcaccacaccgacctgcgatgagaaggtcgtctggactgtgttccgggagcccattcagcttcacagagaacagatcctggcattctctcagaagctgtactacgacaaggaacagacagtgagcatgaaggacaatgtcaggcccctgcagcagctggggcagcgcacggtgataaagtccggggccccgggtcggccgctgccctgggccctgcctgccctgctgggccccatgctggcctgcctgctggccggcttcctgcgatgatggctcacttctgcacgcagcctctctgttgcctcagctctccaagttccaggcttccggtccttagccttcccaggtgggactttaggcatgattaaaatatggacatatttttggag

SEQ ID NO: 1230 - DNA, 6314 bp, Homo sapiens; identical to SEQ ID NO: 319

SEQ ID NO: 1231 - DNA, 222 bp, Homo sapiens; identical to SEQ ID NO: 235

SEQ ID NO: 1232 - DNA, 385 bp, Homo sapiens
  misc_feature: n=a,t,g or c
caagctaaagcaaaccatcttatacagagatctagaatcttatattttccataggaaggtaaagaaatcattagcaagagtaggaattgaatcataaacaaattggctaatgaagaaatcttttctttcttgttcaattcatctagattataaccttaatgtgacacctgagacctttaggacagttgaccctgaattaaatagtcacatgggtaacaattatggcactgtgtaattttaggtaatgtattaacatggcaatggatggcactttaactgaggataggggactatgttagggaaaattggaactaattttaattatttggattgttttaatccctaaaggccttaggttaggccttttcccggatccttnaagggt

SEQ ID NO: 1233 - DNA, 418 bp, Homo sapiens
  misc_feature: n=a,t,g or c
cgtgtggcttttccggataccaggaaaacatactgctttgatgctttccccagcattgacaagatatctaaagtcacctctcctgtgttggtcattcatggtacagaggatgaggtcatcgatttctcccatggcctagcgatgtacgagcgctgtccccgagccgtggagcccctttggtntgaaggggctgggcataatgacatagagctttatgcacaatacctagaaagactaaaacagttcatatctcacgaacttcctaattcctgaagacaacaacttgatcttacctcatttactgtgaacagaagagtcctctgttttgcacatgctttaactgggtagctgtaaaggcttgataaccatggaagaagtgcccaacctttagggtgttcntaatcaaagagctggatgg

SEQ ID NO: 1234 - DNA, 417 bp, Homo sapiens
  misc_feature: n=a,t,g or c
tcaatttgctcactggccagagacattgatggcagttcttatctgcatcactaatcagctcctggatttttttttttttttttttcaaacaatggtttgaaacaactactggaatattgtccacaataagctggaagtttgttgtagtatgcctcaaatataactgactgtatactatagtggtaacttttcaaacagcccttagcacttttatactaattaacccatttgtgcattgagttttcttttaaaaatgcttgttgtgaaagacacagatacccagtatgctttaacgtgaaaaggaaaatgtgttcncgtttttgtaaaggggacntttcaagggatttgttngtaaaanactttgggncagagggtttgcccgaaccttttaaaaaaaatttaattnatttattnata

SEQ ID NO: 1235 - DNA, 2657 bp, Homo sapiens
cccgggcggagggggcgggaagagcgcgtcctggccaagccgagtagtgtcttccactcggtgcgtctctctaggagccgcgcgggaaggatgctggtccgcaggggcgcgcgcgcagggcccaggatgccgcggggctggaccgcgctttgcttgctgagtttgctgccttctgggttcatgagtcttgacaacaacggtactgctaccccagagttacctacccagggaacattttcaaatgtttctacaaatgtatcctaccaagaaactacaacacctagtacccttggaagtaccagcctgcaccctgtgtctcaacatggcaatgaggccacaacaaacatcacagaaacgacagtcaaattcacatctacctctgtgataacctcagtttatggaaacacaaactcttctgtccagtcacagacctctgtaatcagcacagtgttcaccaccccagccaacgtttcaactccagagacaaccttgaagcctagcctgtcacctggaaatgtttcagacctttcaaccactagcactagccttgcaacatctcccactaaaccctatacatcatcttctcctatcctaagtgacatcaaggcagaaatcaaatgttcaggcatcagagaagtgaaattgactcagggcatctgcctggagcaaaataagacctccagctgtgcggagtttaagaaggacaggggagagggcctggcccgagtgctgtgtggggaggagcaggctgatgctgatgctggggcccaggtatgctccctgctccttgcccagtctgaggtgaggcctcagtgtctactgctggtcttggccaacagaacagaaatttccagcaaactccaacttatgaaaaagcaccaatctgacctgaaaaagctggggatcctagatttcactgagcaagatgttgcaagccaccagagctattcccaaaagaccctgattgcactggtcacctcgggagccctgctggctgtcttgggcatcactggctatttcctgatgaatcgccgcagctggagccccacaggagaaaggctggagctggaaccctgaccactcttcaggaagaaaggagtctgcacatgcagctgcaccctccctccgatccttcctcccacctccccctcccccttctcccacccctgcccccacttcctgtttgggccctctcccatccagtgtctcacagccctgcttaccagataatgctactttatttatacactgtctagggcgaagacccttattacacggaaaacggtggaggccagggctatagctcaggacctgggacctcccctgaggctcagggaaaggccagtgtgaaccgaggggctcaggaaaacgggaccggccaggccacctccagaaacggccattcagcaagacaacacgtggtggctgataccgaattgtgactcggctaggtggggcaaggctgggcagtgtccgagagagcacccctctctgcatctgaccacgtgctacccccatgctggaggtgacatctcttacgcccaacccttccccactgcacacacctcagaggctgttcttggggccctacaccttgaggaggggcaggtaaactcctgtcctttacacattcgctccctggagcagactctggtcttctttgggtaaacgtgtgacgggggaaagccaaggtctggagaagctcccaggaacaactgatggccttgcagcactcacacaggacccccttcccctaccccctcctctctgccgcaatacaggaacccccaggggaaagatgagcttttctaggctacaattttctcccaggaagctttgatttttaccgtttcttccctgtattttctttctctactttgaggaaaccaaagtaaccttttgcacctgctctcttgtaatgatatagccagaaaaacgtgttgccttgaaccacttccctcatctctcctccaagacactgtggacttggtcaccagctcctcccttgttctctaagttccactgagctccatgtgccccctctaccatttgcagagtcctgcacagttttctggctggagcctagaacaggcctcccaagttttaggacaaacagctcagttctagtctctctggggccacacagaaactctttttgggctcttttttctccctctggatcaaagtaggcaggaccatgggaccaggtcttggagctgagcctctcacctgtactcttccgaaaaatcctcttcctctgaggctggatcctagccttatcctctgatctccatggcttcctcctccctcctgccgactcctgggttgagctgttgcctcagtcccccaacagatgcttttctgtctctgcctccctcaccctgagccccttccttgctctgcacccccatatggtcatagcccagatcagctcctaacccttatcaccagctgcctcttctgtgggtgacccaggtccttgtttgctgttgatttctttccagaggggttgaacagggatcctggtttcaatgacggttggaaatagaaatttccagagaagagagtattgggtagatattttttctgaatacaaagtgatgtgtttaaatactgcaattaaagtgatactgaaacacaaaaaaaaaaaaaaaaaa

SEQ ID NO: 1236 - DNA, 358 bp, Homo sapiens
  misc_feature: n=a,t,g or c
cttggggagtctaaagaatgtatctctcatcttgtagaggtattaagtgattcgatttatttggtagattaaatgggcaggcattgtcaaatgtggcgatactgcatgggagggcactgtcaagtgaggtgacattagatctcatctcagttatatttatgggtatgttgttgatatgcgtgttccaaaaattgcatacatttatacaaatttaatatgatttgtaattttgatagttatggctaaatatttgcttaaagttatatttgtattaaacatgtcacggatgggctggggcacggtgggccacggcacctgttaatccccgggggtactcccgagggntggagggccaggg

SEQ ID NO: 1237 - DNA, 2000 bp, Homo sapiens
attttcctggggctccggggcgcggagaagctgcatcccagaggagcgcgtccaggagcggacccgggagtgtttcaagagccagtgacaaggaccaggggcccaagtcccaccagccatgcagacctgccccctggcattccctggccacgtttcccaggcccttgggaccctcctgtttttggctgcctccttgagtgctcagaatgaaggctgggacagccccatctgcacagagggggtagtctctgtgtcttggggcgagaacaccgtcatgtcctgcaacatctccaacgccttctcccatgtcaacatcaagctgcgtgcccacgggcaggagagcgccatcttcaatgaggtggctccaggctacttctcccgggacggctggcagctccaggttcagggaggcgtggcacagctggtgatcaaaggcgcccgggactcccatgctgggctgtacatgtggcacctcgtgggacaccagagaaataacagacaagtcacgctggaggtttcaggtgcagaaccccagtccgcccctgacactgggttctggcctgtgccagcggtggtcactgctgtcttcatcctcttggtcgctctggtcatgttcgcctggtacaggtgccgctgttcccagcaacgccgggagaagaagttcttcctcctagaaccccagatgaaggtcgcagccctcagagcgggagcccagcagggcctgagcagagcctccgctgaactgtggaccccagactccgagcccaccccaaggccgctggcactggtgttcaaaccctcaccacttggagccctggagctgctgtccccccaacccttgtttccatatgccgcagacccatagccgcctgcaaggcagagaggacacaggagagccagccctgagtgccgaccttgggtggcggggcctgggtctctcgtcccacccggagggcacagacaccggcttgcttggcaggctgggcctctgtgtcacccactcctgggtgcgtgcagacccttcccctccaccccccaggtcttccaagctctgcttcctcagtttccaaaatggaaccacctcacctccgcagcacccgacttaccaggacgcatgcccctccctctgccctcatcaaacccacagacccggactccctttctgccaccccaggctggtccggccccaggtgtggggtccgctctctccactcccagggctccgcgcccaagtgagggggcccctgccggagcctcagacacactggagttcagggctgggggggccttggcacatacctgtcccttggctatgagcaggctttgggggcccttccgcggcagccccgggggccgaggtagggtctgggggcttagaggctgggatggctcctggccccaccgccagggggcaagcgcaggccgggctgggaggcggcggcggcggctcgggctggggggtcaggtggacgctgcctccggggctggtcgcgcatccctcagtccctcggccacccgggggtcgctccctcgtgcccaccgcacctgccgagcctctttggacccagatctgttcatgcttttgtcttcgtcactgcggcggggccctttgatgtcttcatctgtatggggtggaaaaatcaccgggaatcccccttcagttctttgaaaaagttccatgactcgaatatctgaaatgaagaaaacaaaccgactcacaaacctccaagtagctccaaatgcaatttttaaaatggaaaacaaaaatctgaaagaaacgtctttagtggctttaagccccaaaacgtccctaaggcgtcctcgagatgaagacgggggggagcccccagccaggtggagaccccgcaggacgcggcggcgcccggtgaccgaggcctcgcacagccggccgccctgagggtcgggccggagccagggtccaagaggggcgcgtttgtgtctcgggttaaaataaggttccgtccgcgtgctgggtcaga

SEQ ID NO: 1238 - DNA, 1696 bp, Homo sapiens
ccgagtgtccacaccctgtgcgtctctctgtcctgccagcactgagggctcatccatccgcagagcagggcagtgggaggagacgccatgacccccatcctcacggtcctgatctgtctcgggctgagtctgggccccaggacccacgtgcaggcagggcacctccccaagcccaccctctgggctgagccaggctctgtgatcatccagggaagtcctgtgaccctcaggtgtcaggggagccttcaggctgaggagtaccatctatatagggaaaacaaatcagcatcctgggttagacggatacaagagcctgggaagaatggccagttccccatcccatccatcacctgggaacacgcagggcggtatcactgtcagtactacagccacaatcactcatcagagtacagtgaccccctggagctggtggtgacaggagcctacagcaaacccaccctctcagctctgcccagccctgtggtgaccttaggagggaacgtgaccctccagtgtgtctcacaggtggcatttgacggcttcattctgtgtaaggaaggagaagatgaacacccacaacgcctgaactcccattcccatgcccgtgggtggtcctgggccatcttctccgtgggccccgtgagcccgagtcgcaggtggtcgtacaggtgctatgcttatgactcgaactctccctatgtgtggtctctacccagtgatctcctggagctcctggtcccaggtgtttctaagaagccatcactctcagtgcagccaggtcctatggtggcccctggggagagcctgaccctccagtgtgtctctgatgtcggctacgacagatttgttctgtataaggagggagaacgtgacttcctccagcgccctggttggcagccccaggctgggctctcccaggccaacttcaccctgggccctgtgagcccctcccacgggggccagtacagatgctacagtgcacacaacctctcctccgagtggtcggcccccagtgaccccctggacatcctgatcacaggacagttctatgacagaccctctctctcggtgcagccggtccccacagtagccccaggaaagaacgtgaccctgctgtgtcagtcacgggggcagttccacactttccttctgaccaaggagggggcaggccatcccccactgcatctgagatcagagcaccaagctcagcagaaccaggctgaattccgcatgggtcctgtgacctcagcccacgtggggacctacagatgctacagctcactcagctccaacccctacctgctgtctctccccagtgaccccctggagctcgtggtctcagcatccctaggccaacacccccaggattacacagtggagaatctcatccgcatgggtgtggctggcttggtcctggtggtcctcgggattctgctatttgaggctcagcacagccagagaagcctacaagatgcagccgggaggtgaacagcagagaggacaatgcatacttcagcgtggtggagcctcagggacagatctgatgatcccaggaggctctggaggacaatctaggacctacattatctggactgtatgctggtcatttctagagacagcaatcaatatttgagtgtaaggaaactgtctggggtgattcctagaagatcattaaactgtggtacatttttttgtc

SEQ ID NO: 1239 - DNA, 570 bp, Homo sapiens
  misc_feature: n=a,t,g or c
cgaagtagacaaagacatggagagtgtgattcccaagacagactgcaggttacggcctgacatcagagccatggaaaatggagagatagatcaagctagtgaagaaaaaaaacgacttgaggaaaaacaaagagcagcccgcaaaaacaggtccaagtcagaagaggactggaagaccgaggtggttccatcaaggtcctaatccctacaatggagcacaggactggatttactctggcagctactgggacagaaattacttcaatttgcctgacatttattaaaatgcatacaagtcagggtgtttggctaatctacaaataagtcttaaacctatgtttttaaatttttttcccttggtttctacttatcttttaaaaaaaaaatgaaaaaacactcatgagataactgcatttcaccccaacaaaagcaggggtataaggcgntattgggtgatgaaagtccttagggaaaatgcataatttttgcnataaatggtacctaatttggggatacccantttatatagagggtaagagacactgcttgggggatatgccttttatgggt

SEQ ID NO: 1240 - DNA, 592 bp, Homo sapiens; identical to SEQ ID NO: 326
  misc_feature: n=a,t,g or c

SEQ ID NO: 1241 - DNA, 797 bp, Homo sapiens
  misc_feature: n=a,t,g or c
nnnnnnnnnnnttnttcttaggctctttattagtttttcagcacagttaactctttctacgttgactagagttttgttttacattttatcatctcatgacagcagccaccagaatacacaaaattaggctctttactttgtgcggagaagaaaataataaacattaaaagttcaccttgaccaaagagacaacctccagaagaacaccacacatgggagaccccttcccccaccctccaccaagcacacctgtttctgtctcatagcacatgtgacaatcatctggacaacagccacaagggggcgctcggaccaggcagccactttcctgggtgctctctgggcccagctgggtgcttgtagggccacgcaggcagggggggtcaagggggtttcttctgccccaaggaagacagaacatggagaacccncccagggcaggaaccccacagattgtcccttccagnccacactcttgcacctcctggcctgtcccattctgagcaaggnctccccgaggagnngtgcctggccccttntcccanagnnncctnttgggtnngnaangnnnnnnnaccnntttnnngnnnntncccnnnngtttcantggnttnccgntantncaannnnnnnttnngntnttttcaannnnnnnnnncnnntnntntcannnnnnnnnnnnnnnnntnnnannnnnnnnnnnnnnnnnnnnnnnnnnnnnnnnnnnnnnnnnnnnnnnnnnnnnnnnnnnnnnnnnnnnnnnnnnnnnnnnnnnnnnnnnnnnnnnnnnnnnnnnc

SEQ ID NO: 1242 - DNA, 406 bp, Homo sapiens
  misc_feature: n=a,t,g or c
tagagacagggtttcaccaatttggccaggctggtcttgaactcctggcctcaggtgatctacctgccttgnctcccaaagtgctgggattacaggcgtgcaccagcgcccagtctaggatgtcgtttttctgatacaacaaaggataaggttttagaataatagtatgtcacaatatctttaaaaacagcaggtgcagtggctcacacctgtaagcccagcattttgggggttcaaggcgggaagatcagttgaggccaggagttcaagaccagcctggactgcatagaaagatcctatttgtacaaaaaaatgtaaaacttaaaattgcacaaaatttgtcacctgtaccagcttttagaactgtttatcttatcctcctcagtgatacatcatgaagttgtgt

SEQ ID NO: 1243 - DNA, 579 bp, Homo sapiens
ctgtcatgttactatcaatggtgatttcaatcgcaatattttaaattgatgagaatgatttgtaaacatgaagttactattacgtaaattctgtttgttatagagtttcttcagttgttacccaagtgtcatcctagagaagtcagaagaatcagaatccatcgtattttagagttatgtgaatctacatcataaatgggcattaacattctaaattgcttggtttggagaatgtgttagcagcatagctatattcaactagggagatgctaaatacacagaagtttcaagagccttggaacagaattacaggggaactatatatgtatatgtatattttattaaacacccatcctgcactatcagtattgcactaatgtggaatttgaaagactattttgctgatactgtatatatgcgcatcattcctggattagattgttgtaaagacaatctgaaagatctaaggttttaaaataatttgggtttgaaaatatacagttgtcctgaaggaattgctgtcatacatgaagttgctccgagctgtccttatcccctcctgggccagggtaaccaaaa

SEQ ID NO: 1244 - DNA, 477 bp, Homo sapiens; identical to SEQ ID NO: 328
  misc_feature: n=a,t,g or c

SEQ ID NO: 1245 - DNA, 697 bp, Homo sapiens; identical to SEQ ID NO: 829
  misc_feature: n=a,t,g or c

SEQ ID NO: 1246 - DNA, 5180 bp, Homo sapiens
accgggagcgcgcgctctgatccgaggagaccccgcgctcccgcagccatgggcaccgggggccggcggggggcggcggccgcgccgctgctggtggcggtggccgcgctgctactgggcgccgcgggccacctgtaccccggagaggtgtgtcccggcatggatatccggaacaacctcactaggttgcatgagctggagaattgctctgtcatcgaaggacacttgcagatactcttgatgttcaaaacgaggcccgaagatttccgagacctcagtttccccaaactcatcatgatcactgattacttgctgctcttccgggtctatgggctcgagagcctgaaggacctgttccccaacctcacggtcatccggggatcacgactgttctttaactacgcgctggtcatcttcgagatggttcacctcaaggaactcggcctctacaacctgatgaacatcacccggggttctgtccgcatcgagaagaacaatgagctctgttacttggccactatcgactggtcccgtatcctggattccgtggaggataattacatcgtgttgaacaaagatgacaacgaggagtgtggagacatctgtccgggtaccgcgaagggcaagaccaactgccccgccaccgtcatcaacgggcagtttgtcgaacgatgttggactcatagtcactgccagaaagtttgcccgaccatctgtaagtcacacggctgcaccgccgaaggcctctgttgccacagcgagtgcctgggcaactgttctcagcccgacgaccccaccaagtgcgtggcctgccgcaacttctacctggacggcaggtgtgtggagacctgcccgcccccgtactaccacttccaggactggcgctgtgtgaacttcagcttctgccaggacctgcaccacaaatgcaagaactcgcggaggcagggctgccaccagtacgtcattcacaacaacaagtgcatccctgagtgtccctccgggtacacgatgaattccagcaacttgctgtgcaccccatgcctgggtccctgtcccaaggtgtgccacctcctagaaggcgagaagaccatcgactcggtgacgtctgcccaggagctccgaggatgcaccgtcatcaacgggagtctgatcatcaacattcgaggaggcaacaatctggcagctgagctagaagccaacctcggcctcattgaagaaatttcagggtatctaaaaatccgccgatcctacgctctggtgtcactttccttcttccggaagttacgtctgattcgaggagagaccttggaaattgggaactactccttctatgccttggacaaccagaacctaaggcagctctgggactggagcaaacacaacctcaccatcactcaggggaaactcttcttccactataaccccaaactctgcttgtcagaaatccacaagatggaagaagtttcaggaaccaaggggcgccaggagagaaacgacattgccctgaagaccaatggggaccaggcatcctgtgaaaatgagttacttaaattttcttacattcggacatcttttgacaagatcttgctgagatgggagccgtactggccccccgacttccgagacctcttggggttcatgctgttctacaaagaggccccttatcagaatgtgacggagttcgacgggcaggatgcatgtggttccaacagttggacggtggtagacattgacccacccctgaggtccaacgaccccaaatcacagaaccacccagggtggctgatgcggggtctcaagccctggacccagtatgccatctttgtgaagaccctggtcaccttttcggatgaacgccggacctatggggccaagagtgacatcatttatgtccagacagatgccaccaacccctctgtgcccctggatccaatctcagtgtctaactcatcatcccagattattctgaagtggaaaccaccctccgaccccaatggcaacatcacccactacctggttttctgggagaggcaggcggaagacagtgagctgttcgagctggattattgcctcaaagggctgaagctgccctcgaggacctggtctccaccattcgagtctgaagattctcagaagcacaaccagagtgagtatgaggattcggccggcgaatgctgctcctgtccaaagacagactctcagatcctgaaggagctggaggagtcctcgtttaggaagacgtttgaggattacctgcacaacgtggttttcgtccccaggccatctcggaaacgcaggtcccttggcgatgttgggaatgtgacggtggccgtgcccacggtggcagctttccccaacacttcctcgaccagcgtgcccacgagtccggaggagcacaggccttttgagaaggtggtgaacaaggagtcgctggtcatctccggcttgcgacacttcacgggctatcgcatcgagctgcaggcttgcaaccaggacacccctgaggaacggtgcagtgtggcagcctacgtcagtgcgaggaccatgcctgaagccaaggctgatgacattgttggccctgtgacgcatgaaatctttgagaacaacgtcgtccacttgatgtggcaggagccgaaggagcccaatggtctgatcgtgctgtatgaagtgagttatcggcgatatggtgatgaggagctgcatctctgcgtctcccgcaagcacttcgctctggaacggggctgcaggctgcgtgggctgtcaccggggaactacagcgtgcgaatccgggccacctcccttgcgggcaacggctcttggacggaacccacctatttctacgtgacagactatttagacgtcccgtcaaatattgcaaaaattatcatcggccccctcatctttgtctttctcttcagtgttgtgattggaagtatttatctattcctgagaaagaggcagccagatgggccgctgggaccgctttacgcttcttcaaaccctgagtatctcagtgccagtgatgtgtttccatgctctgtgtacgtgccggacgagtgggaggtgtctcgagagaagatcaccctccttcgagagctggggcagggctccttcggcatggtgtatgagggcaatgccagggacatcatcaagggtgaggcagagacccgcgtggcggtgaagacggtcaacgagtcagccagtctccgagagcggattgagttcctcaatgaggcctcggtcatgaagggcttcacctgccatcacgtggtgcgcctcctgggagtggtgtccaagggccagcccacgctggtggtgatggagctgatggctcacggagacctgaagagctacctccgttctctgcggccagaggctgagaataatcctggccgccctccccctacccttcaagagatgattcagatggcggcagagattgctgacgggatggcctacctgaacgccaagaagtttgtgcatcgggacctggcagcgagaaactgcatggtcgcccatgattttactgtcaaaattggagactttggaatgaccagagacatctatgaaacggattactaccggaaagggggcaagggtctgctccctgtacggtggatggcaccggagtccctgaaggatggggtcttcaccacttcttctgacatgtggtcctttggcgtggtcctttgggaaatcaccagcttggcagaacagccttaccaaggcctgtctaatgaacaggtgttgaaatttgtcatggatggagggtatctggatcaacccgacaactgtccagagagagtcactgacctcatgcgcatgtgctggcaattcaaccccaacatgaggccaaccttcctggagattgtcaacctgctcaaggacgacctgcaccccagctttccagaggtgtcgttcttccacagcgaggagaacaaggctcccgagagtgaggagctggagatggagtttgaggacatggagaatgtgcccctggaccgttcctcgcactgtcagagggaggaggcggggggccgggatggagggtcctcgctgggtttcaagcggagctacgaggaacacatcccttacacacacatgaacggaggcaagaaaaacgggcggattctgaccttgcctcggtccaatccttcctaacagtgcctaccgtggcgggggcgggcaggggttcccattttcgctttcctctggtttgaaagcctctggaaaactcaggattctcacgactctaccatgtccaatggagttcagagatcgttcctatacatttctgttcatcttaaggtggactcgtttggttaccaatttaactagtcctgcagaggatttaactgtgaacctggagggcaaggggtttccacagttgctgctcctttggggcaacgacggtttcaaaccaggattttgtgttttttcgttccccccacccgcccccagcagatggaaagaaagcacctgtttttacaaattctttttttttttttttttttttgctggtgtctgagcttcagtataaaagacaaaacttcctgtttgtggaacaaaagttcgaaagaaaaaacaaaacaaaaacacccagccctgttccaggagaatttcaagttttacaggttgagcttcaagatggtttttttggttttttttttttctctcatccaggctgaaggattttttttttctttacaaaatgagttcctcaaattgaccaatagctgctgctttcatattttggataagggtctgtggtcccggcgtgtgctcacgtgtgtatgcacgtgtgtgtgtccattagacacggctgacgtgtgtgcaaagtatccatgcggagttgatgctttgggaattggctcatgaaggttcttctcaagggtgcgagctcatccccctctctccttccttcttattgactgggagactgtgctctcgacagattcttcttgtgtcagaagtctagcctcaggtttctaccctcccttcacattggtggccaagggaggagcatttcatttggagtgattatgaatcttttcaagaccaaaccaagctaggacattaaaaaaaaaaaaaagaaaaagaaagaaaaaacaaaatggaaaaaggaaaaaaaaaaagaactgagatgacagagttttgagaatatatttgtaccatattta

SEQ ID NO: 1247 - DNA, 7002 bp, Homo sapiens
  misc_feature: n=a,t,g or c
gaattccgtctgagtggcgctcgcggcggccgcgccagtcgcgtcccccaccccaacccccaccccaacggccgcacgcgcgcggcggacggacgggcgcggcgcgtcctcgctcccgctcccgtcccggctggggcgcgtggccgtgtccgccgcgtgcgcgtgctgcgtccaacggcctcgcggggcaggagtaagccgcggccgccgcctgggccccagggcggtctctggggccaggggtcccgcgcccagcgtttcccgcccgccaccctctccgccacgcgcccgcggcaccttttcctcccctggccaagggatccagtcggttcggaccagaaggaggctttcgtttagggtgggggcagcactaaagtctgattggagtcttgcggtccgcgcgtcgcagaagcgccttcggttttgcagagagcaaagagggagcagcgagtgcacggagtggtagtaacaaccaatgttctttccacgccctcactgtgtgtccggcactgtgcggagccacttttctgcctttcatttgattcttgcagtgagctggcgaggtgggtacggctatcctccttccttagcggcccaaggcacgggtttggagagcggggtcacaggcacgcacgggaagggcggggatttgttgacgccgggccctctgactccgagctccccgcttcccaagcctgtttttagtctttgcccccagagcacttgtccctcggggcagtatcagcctcaaaaggccacctgccgagaaggctgcagcggcatttgtacttgggctagttctgggcttccagggagacaagggttggaagtgggaatgtgacaaaggaaaagggtttgggcttcctttctacgtgtacttgtacaggccctgggtagatgtgccgccaccgtagcttctggaaaaaagtagggaaaacgatgagtaagtgcaaatgaacatggactgtgttcctcatcgggtttgaatctcagattgctgatgggaaattcccgccagcgggaagttaggctccggttttagacgttgaatttttttttctctactttttttttaattggaggagacttttgcagaaagaccttgagaagattcactttatagttgaagggaatgaggtgcaaagcgacgaatttaagatctcactagcatctgtgggttaaaatacggaattggaatagaaaggttggcgcccagttacagtatacatttggacctctgtggagcgtgtcatgctggatgaattactggtgttggagatgtgttggaaaaaacaactgtgacagtcgagatctgtggatgaaagtttgtgtacactccgtttatttagcatttactctgctgggttcttgtgtatatgcagaaacaagatgcttttcttcagggactggagcttatatttttctagtagttaccatcttttagattatttaaaagccaacatactccttggcttagtgaaataaatcttctatgttatagaaacacttctataaacataaagatttctataatcgtgttctggaaaccctttctataaacatgtttctataacagtattataataatctataacagtattataataatgttccaagtaacatttacttggaactttgctggtgtggcgattccggttacttgcccttacagactggttactatgaatagcatttaactagactaaagttgagcaatttaagttgtcaaatgaaaacactagaatgacctacatttaaactgtttaagcttgagtccagctaattttattactgcttgaggcaaaatagaatgaaattaccttacacattattgagggaaaatttcgttagtttctacttaaaatattaaaaaaatacagttcttggcctcaggcaaatggttatcacttgggcaggaacatgaaaattacgtgattatttcacaaactggtgctctaactgattacttgtgcatttatcaggaacaagtgaattgaagcaaattgtggtaatgtaaggcttggcaaggctgccctacatccctaccaagtcatacgtcagttttgttggagctgcttaccggtacaaaagtctaagcttttgtacctcttacaggtagaaaagtagagagttctttgtttaactcagtttgctgttcctgagctgacactgcaccaggggaacattaggagattttggtaatgtttgtttgtgacctacttagagcagtttttgttttgtaacttatggtttttttttttcccactcgttctagtattttgcatagaaagtgaacggcagaaggcagttttaagtttttgtaaaagtttgtgaattttatatcgtccttaggactgatggggctagtgttaaaagataaaatttaacataaagcttacatttgtgactaaagccaattttatattttttttctttatttttgtcagtctgataaaactgcccacttggtcttttaacattttgcaaattgattttttttttaactttcagaatttaaataggcattgtatgtttgtttaattatattgtgctttggcttccttggacgaaactattactgactttacaaagaagaatggataattgtggaagtaggtaggtcaaaaaaaaaaaaggaaagcctcgcccgccccccagtaatttgtcaaaagcaagtgggaaaaatctctggtagtgcagtactgcccttccagtactccagtacaagccctggagttgaatttagattcagcaactattatcttacatgtagttggtgatcacaatgtggtggcacactaggtttataattttatatctcagaaatcagctatttacttttttttaaaaaagtattcttggacatcctgtctgtctttagttgggaaggtcaagttgcaagccaggtgatagggttaagagtaggaataattcacacacacgaatagtgtcttaatattctgtcttacaaggtggaaagcaatttcaaaaaaattgcccttacagcctgtagcttagtaaataaggtctttaggcgactttgtgatagagtccctcttctgtcaggtggccagtctgtcatgtaataagctcttggtatgtgtgttgtatcttaggtacttaatcaaaagtaaagattaaagatgattgacagaaatttggcttcctggatggtatacacatctacttagtagggatgtaatctttggtggctattaacttcactggctgtataaagcatcattatgtatttgtgtaaccttttgcatatttagagagtgctttcacacatctttggtattaccatacttttactaaaaagtgaattggagctctgaaaccgaattgtcaaaactattttgaaaagcatgtggtacctaatagggtactatagccagcttatttccttaattgaaaaatcttagagggattttgaatctggaatgtatgaatgtgacacctgcctgcccttgccagttctcccatatgctgtttatgcaaagccatagcgtgtgcttaagtacacccttgtttctgcactgaggttgcctagatttccctggagtgtatccacctgtcttgatctgtttaagaattttgcggatgagcattagtattaactgtaacatatcttttcacgtgatgagaaagaacaaagatttttttaaattgtgaacctgagtaggttttaactttggagtggggaagggatacactaagataaaagatagttgttaagtattctgattcctgaagttttttttctttcaggaaaacggtatttttgagataaagtaagatttgtggaagagttgcaatagagaggtcttgaatacccattatccactgttaacatcttatgtaatccaagtacatttaacagaactgagaaattaacatcgataaaatactgttaatgaaagactttatttggatttccttagtttttctactaatgtcctttttctgttctaggatccagtccaagatgccacattgtatgtagtctcctgatctgtgtcagtttctgtctttccttttgtctttcgtgaccatgacacttgatctcatttggatttgatgttaaggattagactgaagttacagatttttgggggaagaataccacagaaattacccttatcacatcagattgggggtccataatatataactggttgaatttaacctgatgatttggttcaggtggtatctgtcaggttagtgtttttttcccctttagatactattccttagatgctagtcaccaagtccagctcacactcaaggagagaggggaattaggctctactttctagagggaggagaatgtgaatttgtggaagtatattaaagctactgttattattttgggggagatgcttcgaagccatggaaataaagttcccctccttaattttagcattttaatggatctcgtctgcagctattattacttcggggttctaatggtgattttttttattttcctcattccttctacagtataaattttctgtgaggaagatttgtgtattcttcatgttttttctttttttcatttatatcactatagaccacggatattaattttattctttgggttgtaatccacaattatccttgctgatgtttacttatttttgattattatttattttatatttttataaaatatcgtccaggctgtctcacactcctgggctcaagcaatcctcttgtcttggcctctcaaagtgctgggattacaggtgtgagccactgtgctggccacagtttattttgttgttcatgttgttccagcttttttttttttttttggctcctttctccttttgacacttccctatcttatctgttttttaaaagcatgttttttctttcattaattaccaggtatttcaggctcatcttgcattttgcctgtctcaggtccagaatcaaccatttctccaaggaggcgtcaggaagaattgtgaagggaggtgacaggtggtaaatgcgaagagtttggaaaaatagattgacagtaggcccagtgatgttgatacttttcttgctctgagcacagatgttggcttctgtattcatgttactccagttctggnaaaagnttttgtttctaaattcccacgatttagagaaccagatatcaaatgtttgaatacatgacataatcctgaaanaaaatttacaaaaatttaatatattctcaagttagtacacacaaacacttgctgtttttccttggtgtttttgacaacttttttaaagtaaaaagaccacttaaatactatcgtactcagaattaacatttgacattttgcattgccctctaagactcctttttttctatacgggcttccattcccttccttccagggatctttttcacatctttccaggctgttttattgatggggaatttttaaaaatagctttattgaggtataattgacaataaactgcatgtttttaaaatgtactgcctgataatttcagacaccttttgtaatcccagcttctcaaaagactgaggcagcagagaggattacttgagcccagatgtttgagctgcagctgcagtgacctatggtcatgctacgcactccagcctgggcgacacaggagactcttaaaagaaggtatacccatgaaaaccatcaccacaatcaagattgtgaacctatccattacccccaaaagttttctcatgtcccttttccctctttcttgcttgttccttctacccttctccctgcaggaaatccttgatctttttatcactgtagattactttgcgttttttagaatttttttgtaaatacattatgttctttttttaattgctcagtgctagtctgttgtgtaggcatatcacaattttttggtttacctgttggtgggcattgaaaaacggcaaaagctgtgtgtttccagctttttgactgttacaaaataaagcttctgaactttgtgtacaagtctttgtatgggtatacgcctttatttctcttgggtaaatgcttaataggggaatgtttagatcatgtagtagatgtatgcctaacttttaaagaaactccctgttttccacagtggttgtaccattttacattgccaccagcgatgtttggggggttccagttctgccagtatgttggctaacagtgtgtatggtcagtctttttaattttagtcattgtgacaggtgtttagtggtacctcacaggttttaatttgcatttctgtaattgctagtgatcagcatttttcatttggcattcatataatttctttggcgaaatatctttaagtcttttgctcatattttatgggattggttacttaattattaatttttttgttttgagacagtgtttcgctcttgttgcccgggctggagtgcagtggcgccatctctgctcactacaacctctgcctcctgggtttaggtgattctcctgtctcagcctcctgagtagctgggattacaggtatccaccaccacacccggctaatttttgtatttttagtagagatggggtttcaccatgttggccaagctagtctcgaactactgacttcgggtgatctgccctcctcggcctcccaaagtgctgggattacaggcatgagagtactttatatattctggatagaggtattttaaaaattagagatatgggtcaggcgcagtggctcacacctgtaatcccagcactttgggaggccgaggcaggtggatcacttgaggccaggggttcgagaccagcctgggcaacatagtgagaccttgttgctactaaaaatttaaaaaattagccaggcatggtagtgtgcgcctgtagccccagctactcgggagggtgaggtgggaagatcacttgagcccaggagttagaggctgcagtgagccatgatcacaccactgcactccagcctgggtgacagagtgaaaccctatcaaaaaaaaaaaaaaaaaaaaaaaaaaaggaattc

SEQ ID NO: 1248 - DNA, 477 bp, Homo sapiens; identical to SEQ ID NO: 330
  misc_feature: n=a,t,g or c

SEQ ID NO: 1249 - DNA, 406 bp, Homo sapiens
agatggagtctcgctgttgttgcccaggctggagtgcaatggcacaatctctgctcacgacaacctctgcttcccgcagccaggttatctcagaagccaattttccctttagggaaagttacagaatcagccagggaagaggaatgggaggatgggctggatgatccctgttcaggcctaatccgctggcctccctggggcctccctttctttgtgccaagccctgtgctgggtgctgggaactgggaacacagaatgaatcagacatagcctttgttcccatggggctcagtctcatggggaagacaaatgtgtatcaggcattattgacccaggatcatcagtgctccaataaaaagctcagagggtgggttgggaaggcttcctggaggaggaggtactggaa

SEQ ID NO: 1250 - DNA, 475 bp, Homo sapiens
  misc_feature: n=a,t,g or c
gttcaaaaattttttattaataattcattttcatagctcagaaaaggatataatcagtagaacaactaaaaacaaaacctcacctctacagagatagccagtgtgtagactttattacataggcacatattaaaaaaaaaaaaacataaactggttttacataaaattaaccacaatagtgcaagaggttacactgaatgagaatggatgatgaatgatggaaaatgtaaggcttggaacagctgaatcattcactggatcttgggttcatccatcctgacgcactgaaatttattacagacattacaagaatggagggtgaggaatggtgcttcctctgtcatcgcctgggctaaaacactgattttggatttaatcnccttggaatacggtagtttttctccagggttcccctggttnaggttaggacctaaaaggttaaatngaatggcngggcttaagggtcnaaaggant

SEQ ID NO: 1251 - DNA, 468 bp, Homo sapiens; identical to SEQ ID NO: 830
  misc_feature: n=a,t,g or c

SEQ ID NO: 1252 - DNA, 410 bp, Homo sapiens; identical to SEQ ID NO: 831

SEQ ID NO: 1253 - DNA, 405 bp, Homo sapiens
  misc_feature: n=a,t,g or c
tttgcacattaatgttcatgatacctttatttgtaatagccaaaaccaggagatagtaaaatgttcatcaacaaatgagcagataagccaactgtggtccatccatataacataattctactcagtaaataaaggcataaactacagatacacaatcaacatgaatgagttttaatattattatgtcgagcaaaagtgcaagacaagaaatgagtacagacagtaagattccatttatataaaattctaaaaaatgtaaacagtctatagtgtaaaaatgtaaatgtctatagaaaaacagattaggaattttctggggacgagggtgggatggcaggncggaggaagagggagggattacaaagtagcncgagaaaaccttttggggtaatgaatatatacatt

SEQ ID NO: 1254 - DNA, 492 bp, Homo sapiens
  misc_feature: n=a,t,g or c
aactttttaaacaatccattttaatcatctaaattatttacaatacaataacatggattcatcctttttaagacatgggattgtaaaaatcaacaagtgaatgatgcttcaaataatacatttaaatacattaatcaaattttttcagtgcttaaaactttttctccatgggacagcaggctctggacaaaagtgcctagcatacaagttttcccaatttccttctatcataccagctgcacataaaaaggttcatcacctcctgtctccaaagtgtctccctactgagtgttcccaggcagacaatagttcctgggatagtgctgtttggtaacagaaaagcccaagcgtagaggacagattaaaaggcagggaccagaccaccatgggatacaaatccccaagacagaggatgcccccatgcctttcccccatgaagccttatccngtctgcctggtatctcccatgattgccagggcatagggctactt

SEQ ID NO: 1255 - DNA, 470 bp, Homo sapiens; identical to SEQ ID NO: 832

SEQ ID NO: 1256 - DNA, 395 bp, Homo sapiens
tttttttttttatcttaattgtaaaaggtttatcaagaaaaaagattcaaggagcagcatccaggaggagaccatgacccccccggggcaaggggggcagtggtgacacatgtcagcaccccacagcaagctgctggaccacaccctgacctgggtggggaggaggcagaaacccctcgggattgtaaacataggtcagagacagcacaacctgacggggagcaggggcccacattccagcgaggcaggcagagggcaggtgggcatggaatccctcgcatggctgggcaagcaggcccctgtctttttcctcttaggtttcccattgtgcaacaggaaggatcttgggaagacagtgccacagatcccaaaggaccctggggatcctggggttt

SEQ ID NO: 1257 - DNA, 227 bp, Homo sapiens
tttcagcacagagaggcttctttattccaaggatctgatgttgcaagatctaacatttctacccccaggcattctccacctgcccatccaatctgctaaatagaaatcatgattccttcttatagactcctccgccttcccttcttccttctttaattctgcagtggggccatggggagaaagagggaagagggagaagagtagctttctcactagtccccaggcga

SEQ ID NO: 1258 - DNA, 429 bp, Homo sapiens; identical to SEQ ID NO: 99

SEQ ID NO: 1259 - DNA, 516 bp, Homo sapiens; identical to SEQ ID NO: 834

SEQ ID NO: 1260 - DNA, 233 bp, Homo sapiens
gaaagttcagttcagtttattacagtgtcaagtagatttacaactattgcacttatcattctggtgacagaaggccaaaactgaagattgagattttcctctaataaagataggttttcagaatcttcaatataagatgttaaaattataaaggcaaagatatatacctcatgttccattccatatccttcctgctgttgtacagtttgctgcaaatgataatttaatttggg

SEQ ID NO: 1261 - DNA, 178 bp, Homo sapiens; identical to SEQ ID NO: 103

SEQ ID NO: 1262 - DNA, 190 bp, Homo sapiens
ttttcttttcaatttccttattcaaaatgggtcaaacgtattttagttggaagccaatttctgagaatgtaccatagaatatttattccaataaatctacttactgcgaactgaacatactctcggcactgttttttaagcacgtacaatttggctatacattgggtggcataaacttcacttcttaatc

SEQ ID NO: 1263 - DNA, 430 bp, Homo sapiens
  misc_feature: n=a,t,g or c
gaaagctcaaattccagtttgctttatggatctgacaaaacttcgccaaagtcaccctgcaccaagcctgactctccagcccagctgagcnttgtgttctcaacttgggaggtgggtggcaggtggtctcggagtagggagctctatttacgcctgggtagagacttctaagctgctctgtgtctcagggtttctgtggtggataatcgaaaacaagactgagtcctaagcacatttcctgcacaaaaaatggcctctcactgctatggtcaggaatcaatgagcatcatcccaaatttgaatcctctaacccccgcctcaagagacacataaggctctttaacttttggatttccaaggctgatcagatgaaagtttcttcagtttgtagacttccagaggctatgtcattcctgaatgttaaggacaa

SEQ ID NO: 1264 - DNA, 406 bp, Homo sapiens
cagatatagataaaactttatttatacataaaaaattacactttaggaattctgttcctaaaagcattctcttagtaaagctcaaaatgaaaaggttgaaaggggcagtgaacagctttttaactgtgtacatactgcagtcacaagcaattttttaagctgcaaaaatcatctcttctaagtagcatgagcttttgaaactgcagacttaaatctcatgatggcatcaaaagccaaagcgaaataaatcaatattctgaaatagaagacttggctgtcgatgttaattgggtgctatctccaaccactttccatcatgttacttcttcctcttaggtgtaactcaagaaataacttttttctaataatacctatcactgcatggaaaaaatgaaaagagaagtga

SEQ ID NO: 1265 - DNA, 460 bp, Homo sapiens
  misc_feature: n=a,t,g or c
ttttactttttgaagaatatttattgacatgggaaaatgctcacaatatgttaaagaaagcaggatacaaatctgtaaatacagcatgatcccaatcttgtagtaaaataaattatatatgcatagaaaaaatacaggaaggaaatacactaaaacattaacagtgatgatctcaggatggtgggatttggggtaaattattaattttattttctgcattttccaaactttccacaatgaacatatattacttttataatcagaggggaagaggtcaatacaggtgacacctagtcctgggaggtggcgagactgatgtggcactaagggggtgtttagagtcacttgtactgcctcattctgtgtccncctttataaagaagggataataacacctggccctggcctggcctcccaggactactggggcatctgaaaggggtcacaatatctggtgatt

SEQ ID NO: 1266 - DNA, 425 bp, Homo sapiens
ttttttttttttaaaagcaagaataatctttattccttggaaacacatttgtaaaaatgctatcaataagatgaaaagattcagaacacatttatttgtatgcagcacatacactgagcatcagaacgtctgctaaaatggaatacacctgtaaacaaatgccttagggagagtttataggtagtcagctccactgtgcaaggtatgcagctgataccttcttgctgaatagatttttgcagtagccaaaaaagatcagattttagtaataaaatatctcaaaggatgtcaaacattttttagagggcctaacatgggcaaaattacaattacatatacaaaaatggcacaagaatcaactgatttcacagaaatactaataaaacatttcagggtctattattaagagaaaaaaatgtttgact

SEQ ID NO: 1267 - DNA, 451 bp, Homo sapiens
  misc_feature: n=a,t,g or c
tctcaacatggaaaaactgttcaggcacaaagattaaacaagcccgcgttgcatcccttggattgtactgaatcactgggtcccccagcctccctacctacccctgcaccccagatctgccttccccatattcatggcctcctcctccaaagcagcccaaagcagcaatgatatttactattttatatcaatctcttgctatatatatatatatctatatatctatatatttgtctatcctatatatacataggattttaatgctttgaatgagtgaaggagtgaatagggaaagagcacatgagtgaggtgtaaatgtcaccaaatgcattaagggacatatttgtaggagctggacatggggaaagggactattaaccaaccgtggccnttgccaggctgggagaagttttncactgtgctggataaggcagtagcaagcaggggttgt

SEQ ID NO: 1268 - DNA, 399 bp, Homo sapiens
tttttttttttttttttgtgcaatcttgatgcagagctaaacagtcctatgaagagagacagtgtatcttttaattaattggcactgaaatttcactttccttagctgcattctagtagcttggccaagttatctcgtaattctgttagttcaaatatctttccatccagaatttctaagagtgtcttcaggttattgcgaaaagcttcttgttcattctgacttttctccagacgttgctctaagtcagacagttgtccctccaggtctttgttccgaatttctacttcctgtagtttctgagtcaaagaatccctctgttcttgtagttctctggcattatcaatttcttgttttaacctttctatttcctcttccttcagtttcagtgtctcttcc

SEQ ID NO: 1269 - DNA, 441 bp, Homo sapiens
  misc_feature: n=a,t,g or c
tgacgtgttacctgctatttttattccccatttgccatcttctgattgggggttgatgttttacagatttttttttcaaaggctttatttcagtttctgaggttaggatgcccctgtgcccctcgctccacacctgggcaggtctaaacttccttccaggatggcctccacacacagcctcccacctggggtcacctggcttcctgggggacccgcaanganggggcagggagcagcagtccgggtgcggggatcgggggacctcggcgggggcatccacaggggctgcaagacctctggtcagcatggcgtgggtggggagagcgtttctccctggggtcctgagccagtgactcctgttaggacctttgtcccacctccgcctggtggaccggcaggacctggtctagccagtcctgcagcctccattcccccacctgc

SEQ ID NO: 1270 - DNA, 455 bp, Homo sapiens
cggtgtagcagacatttaattcttatttgccaactcctgagctaggacctggtaacacaaagttaaataggacacgattctagtcctctaggcaccaacggtcttggaaaggaaggcagacaagtaaactggccatttcaatactacgtggtcgttacaatgctagaggtaggcacagggggcgcagtgcaagggaggaagggcgttaacatctgccacctacttccaggtgccaagcactgttatcaacattattccactttattccctggtgattatgaaaggcaggtattgatattcacacttaacagacgaggaaacagcctcagggagataagcttacttgacccagtctctctcctagtccatatcagaaccaagattcaaacaggttttgtttagaaaatctaggatttttcagccataccaaataaagtagcctcagggaatcaaag

SEQ ID NO: 1271 - DNA, 466 bp, Homo sapiens
  misc_feature: n=a,t,g or c
gagcacaaaggtccactttacttacatgaaggaacataaaggcatgagaaacagtcatctcaataaatgcaagacatgagcataaaagaggttctctgcctttccagcgttgttattacagagagaaacctacaattattttgttaaacaaaattcaaggctccaggactcatctctggagctgatatgtcttaaatactattatagtaggaaagggagaggagaaaattccccacccactcccccgatttggcccgtgtagcttccctttgagggtgtgtgacttgccatctgcaaaagtcatggccaaaacaggaactaacaggccaaactaccatcaatctagtcttctacagcaccctaacagagtgccagggtcctctgtcncctccgcacctgaggncaaagttccaggaagtttactgccggtgttaggaggtgagctcaagttcagtgtctgncttct

SEQ ID NO: 1272 - DNA, 397 bp, Homo sapiens
gctgattgaaaatgatttattaaagtccaattagtatgcttttcatttcaaataatccatatagcctccagaaaaatatgcacatgtgtaaaagtccacgttcatttctttcacttccaatataaagtattctgtattttgtataaagtacgtgcaaacacctttctgctaatcgggtccccacattcttttcactacaggtactttacaagtctgccctctgctcaaacactaaccgtgcactgacatcctccttcctagacagccattcatctcccggacttctttctctcagacatcctcctgacctcccctgacctgcttcaccactgtgttacctcactggttacttgttacagcaaactgatgcaactactagtctacctgggacaacata

SEQ ID NO: 1273 - DNA, 352 bp, Homo sapiens
aaagtaatttctttattgagaaaataaagacatggttcctaaggaaaagggctaaaaatgaccatgtttcaagtacactagtgaatagcaagtgaaacaaaatgtcttaagcatctatatgtcttatcttagatacatacaactattgtaggaacattatttctcttatctctcaggaaacatatttagttataatatgaaaaaaaaactaaaattgagcttctaatagaaaatcaaaccctatcagaagaagagttacgtggagtaagcgattttataccgatgctggacttactctccctaccataaaatttggataaacaacaaacatttattaagcacctaccacatg

SEQ ID NO: 1274 - DNA, 483 bp, Homo sapiens
ttttttttgtttttaaactttttatttttaatgatgataaaattttaagctaatgacataattgctttatttttatttactcattcagagttaaactccctcaatttctgaactactcccttgctgagagtcaggttctcagttactattacaaaatttaataatagaactgttccatatgcacaagggaccaagacaaaggaatgggaaggctagagaataacattaacatccacacactgtgtactgtgctctctgcttgatgctttgcccacagtgataatttcttcatatagtgcaaagtagtttgtaaggtggttttaaattcatgaggtctcaagtactctctgccttataggacagatgtagatacggtttcggtttttctgtttttaacagttttataagagtacaagtgatgctgttttatttgaaggccgagagcttcggttcctaaccgaaattggctacctgggctctcta

SEQ ID NO: 1275 - DNA, 412 bp, Homo sapiens; identical to SEQ ID NO: 336

SEQ ID NO: 1276 - DNA, 634 bp, Homo sapiens; identical to SEQ ID NO: 113
  misc_feature: n=a,t,g or c

SEQ ID NO: 1277 - DNA, 436 bp, Homo sapiens
  misc_feature: n=a,t,g or c
tttttttttttgcacttccgtgtttaataagccacatcctcagttgagcctggggtgaaatgtgagatcctgactctgtgcagtagtattagtgggtgggccagggntgtgaataacatcatcctcagtacagctgcaattccagggcccctctaccacaaagatggcttaagcaaaggcagccagatggaagtatgatatccaacaggaaggaagtaggcaggggtcactaaagtggctggtggccagcagatggaaacagaagtatggccccgagggaaggaggcaggtccagggctacagtgctttcaggtactggtgtttctataggggcatttgccacccacatctttggaaactcccctggcctattgtgacatggcagggctgcctggttcttgaaggtagagaaaatgctagtggggaggagctgaac

SEQ ID NO: 1278 - DNA, 411 bp, Homo sapiens
  misc_feature: n=a,t,g or c
tgcacaaacagttttatttgatgaaccacagtgactaacaggatcagaagacagtgcagatattctgaagaaggcactgggggaggtaagggggtatcacagcaggcagcctnctctgcttctgtcccagttcacagatgagttccaggcaggaagtctctgcaggtcacccacggcggcctcagagggacaatttcttcccttctagaagcctcttccagtgttcactggatgctttgaggacagctctgggcagaggaggtgactctgtgaaagatgctatcttaagatggggagactaggctgtgaggagccccttcccctctcctcctccctctgcccccagagctggcgttcattccagggagggtcaagatgtccattcacatcaagctgggcttttcttatctc

SEQ ID NO: 1279 - DNA, 213 bp, Homo sapiens
tggacatctcagatgtgactcttgctgccaggctagaatttaggctatgtgataattctcagctgtcctacaatgcctgcttcttgaaagaagtcggcactttctagaatagctaaataacctgggcttattttaaagaactatttgtagctcagattggttttcctatggctaaaataagtgcttcttgtgaaaattaaataaaacagttaa

SEQ ID NO: 1280 - DNA, 253 bp, Homo sapiens; identical to SEQ ID NO: 116

SEQ ID NO: 1281 - DNA, 468 bp, Homo sapiens
tccatgttaagaatattttatttgttttttgagattacatagtcattattgctgatctaatacaatcacttagacataaagatttccaagaacttctcagaaatggtgatctttagaagtgttattcctttcagtaagatgacagaactagatgattacgtatatagatatatagatatatatatatatatgtatatatagagtttagaacctgtccacatataatttgctggtgttgcctattttccttccgtaattttcctttattgaaaaagcttaatgcaacaatgcattttgattcctttttaaaaaccacggcaaagttaattttgagaaaaccacaggagcagcaatatcagatctgtttagagaaaagcgacgagcataaaagctttgcaggagtatgtggccatggggagccgtgctcatatgggcaagtaggatagggagggaggagagcagagggaa

SEQ ID NO: 1282 - DNA, 381 bp, Homo sapiens
ctctttttttttttttattccatttttacacatccacctgtttgccatgaagtcacaacattttatcaaaatatacacacagcacaaatacctttaaaatgtatggttggaattctaattcaactcaattgactgctgcaaacagcatgcatgggccattgatcttgaatgatgcctacggaggggcttatgagtcatgaaatcaccagtcatggcacgagaaggggttaaggttcttttcccaggagacttatgcacttcatttcttttcttgttatagtgtgagaatggcagtgagtgactgtgccaatactggagtctgctgagaatgggtggatggaaaggtttttactggcaagggtgaaatgatactatcttttc

SEQ ID NO: 1283 - DNA, 309 bp, Homo sapiens
gctttttaaatgacatttattttttctaataattcaagtacataacacattttcaaagggaaatttgaaaatactgaacaatgtaaagaaaagagatagaacttatagtcctatcattaggagataattattaagtattaacttgtgcgtacttatgctttcttttttcagcctatagcatctggtctcccatccaagtaataacctggatcaatcctgcttaagtttccaatattaggcattttcagggtgttgtgaccacagatgatgtaactattaacttttaaatatttttctggtctttacata

SEQ ID NO: 1284 - DNA, 447 bp, Homo sapiens
aaatcattcagtttaaggtcactagactttagatgagtgaccctgcaggtttataaggcattctgctcagcagtcttgtaaatagtcctatatgaaagagccatgctactgttggacttggtcccactctggtcaaccttgataacgtcatacgtggcttatggactggatagcactggattccgccgcagccctggccatactgtgccacacgttggaagaactgtgggatgtagaatggagggactccttgtcagacagtgacagcatcatagcatatgcctgcgatttggactttctgtgtaacggctgcttaagttcctctggcacatgggaagtactaaaagaagacagctcagcttcagaatattgattatcttccattttcctcattttgagggctatctgtgaagtgccttatatgatctagagcagaaagtccacttt

SEQ ID NO: 1285 - DNA, 469 bp, Homo sapiens
tttttttttttttttttttttttctgcttaaataccaatttattgcaaaccaacaccaaggagctggaatagctttgcaggctggacacctcactctcctcgggccctggacaagggaaatgagtcaccccgctttcctcggacctcagctggtgggacttagtggctggccaaactgcggctgttgtgtctaaaaagagaaaacaggcagggtgtgccagctctggagactgggccagtccagggtggtggctcagggcagagaatcacccaccagacagcgtggctcaacgggagcaaggcgcgcagggacaggctccacaaccacaccaagcaccgcagtgtggcaccgggaccagatgcaagtgctgttcctgccatggggccaatacccaatactatccctcagtcattcttcctagatattggtttgctgtttattaaagcagggcagggagtggggagaaat

SEQ ID NO: 1286 - DNA, 467 bp, Homo sapiens; identical to SEQ ID NO: 345

SEQ ID NO: 1287 - DNA, 268 bp, Homo sapiens; identical to SEQ ID NO: 126

SEQ ID NO: 1288 - DNA, 342 bp, Homo sapiens; identical to SEQ ID NO: 127

SEQ ID NO: 1289 - DNA, 379 bp, Homo sapiens; identical to SEQ ID NO: 346

SEQ ID NO: 1290 - DNA, 325 bp, Homo sapiens; identical to SEQ ID NO: 844

SEQ ID NO: 1291 - DNA, 393 bp, Homo sapiens
ttccttttaaaaactttatttaaatggagactcttagtcaaatgattggaaaaccaataacgaaaaatagttcttcaggttcttctcctggaaaggcggaggacacaccaaactgcactggccctgtcaggggacacggcaccctcgtgggaccaggctcagccctcggggtggcacgaggtcctgcaggctgcaggaccgtcacactccagccccgtctggtgacccaacccgggcccgtggtgcatgctggggaaggccactgcgaacccctgggcttcggctcctgaggaggcatggcccacaccctgcccggccataaatatatacagattcctgggcatccagggcaccaggaccgacgcagagctggggtcctgtccctaagcctgt

SEQ ID NO: 1292 - DNA, 351 bp, Homo sapiens; identical to SEQ ID NO: 845

SEQ ID NO: 1293 - DNA, 433 bp, Homo sapiens
ttgttttttttttagatctaccttcagttttgtcattttccagtattcacaatcctttcaaagtttcctttaaaggggaaaaaacagaggcttgtaagaaatatgctcaaagaggttctaggacttacagacatcccattccagtataagatacaaaaggcaaaatgtttcctttacccatgatccaggctagctccaagaatcctaaaaacgatgttttaatttggaatctgggatgcggcgttttgtggattaacatgtgttctgacacaaggactactctacttccttaagaaacatgagcaaaaatgctttgctcaacaacctagttatgtatgtacaaatggtgatcatggtccttactgataaaaaacttataagcaatttctgttacaaaatcgatcttgctaacaggtcttggtgtataagttag

SEQ ID NO: 1294 - DNA, 323 bp, Homo sapiens
  misc_feature: n=a,t,g or c
ctgggtgcaagaggtttatttgggagccatcccaggaagcccaaggcgggggagtggggaagagagggaagggagagcccccgcagaagtacatgaatgagtgggttactgctgcgggcaactgggactccatcctgctgggcatcctctgagagtttatgtagaatacacttcagaattgtcctgctcaaggacaatgaagctgaggtcctgctccttattgactcagggttgctgctcctggggacattaaccccccaacacttctagcttncccagtgcactgactnagcacacagctatggccaccagggaaccttttt

SEQ ID NO: 1295 - DNA, 423 bp, Homo sapiens; identical to SEQ ID NO: 355

SEQ ID NO: 1296 - DNA, 389 bp, Homo sapiens
taatatatgatttttattgaacatgttcacctttacattattacaaacattttacaaataaaaagtttttgtaaaaaaaaaaaaaaaaggaaacatttcctgaattatcactggatagttgaaacaaagaaataaaatatataaatatgaaggtcattctccaagtattagaacagaatacggatggaatcacttcagtaaagttattcataaacatttgcatggttacccacatactgtatcaccttccaaaaaatcaaacacgagaggaaggggaacctcaaatgagatgtcttttctccatgggatttggtcaacgcatatcagtaagataatttctttgctatatacacaacataaacatttgaaaatgcagaatacattgtgta

SEQ ID NO: 1297 - DNA, 517 bp, Homo sapiens
ttttttggaaaccgagtggggactttactgatagtgacagtgatgacttcggagaggctgacggccggtacttcagggtgtgtttcaaaaagctgcccctggagggaggtggtagggaggcggtggggagctgcactcaccccggcctgtcccctccagctcagccagcagtcacactgcccagatttctttcttttcctctgccgcctgctcagcccgctgctcaaggcctttgcacaggctgccgccttcctccgccaaggccagctgcccgatactggtgaggcccttgttcccttgcagtcctcgaggcaggctgtgtctgtgctgggtgccaggtctaggtcttctctcttctgcagagttgggctacacagagcagctgttccagttcctgcaggccaccgcccaggaagaagggatcttcggtgagtcccaaccagtcagcccaggctcctgcaggcagtggtgtttgctggtggctgctgcccctgcaggacagtgacacccaactcta

SEQ ID NO: 1298 - DNA, 271 bp, Homo sapiens; identical to SEQ ID NO: 847

SEQ ID NO: 1299 - DNA, 363 bp, Homo sapiens
ttttttttttttttagtttgtaggaaaagtttatttaatggggagactaagacgatgcaagatggttactagaaaaacatctttcagtctggataaatacacaacaaaggatcatagctgaaataccagtgaccatcacaataggaaaggtggtcagcttgtggaattttccttttggtaaccttaagaagtcattttagcagtactaaccatacagtatatgtcaggcactgtaataaactctttacaagtggtacttcatttagtcttcacgacactgaggtagatactattaaatgtccccattttacaagtaaaaaaattgaggttagagaggccacagaaggtacctgaggtttggga

SEQ ID NO: 1300 - DNA, 436 bp, Homo sapiens
tttttttttttttttttgagggtagagcagcatctatttaatataatttttatatagaaaatacaggcatatttaaaaatggaaacatgtaagaaagtatgtcacaaggaataacaaaatatatcacaaaataaaaaaagtaaccccaagtaacaagtttactaaacaagacccagcaccatgttggactttctttgcataagttccaggatgcccaggcactaccgaggagagatgatcctgcttttgggagagccagatggtcgtgcagtggttaaaacccagtcctccttttcctggaacagttatgtcccgtccaagaagaaagacattgacatcgggttgggcttacacattttccaccattttaacagggagactggcaaacagctgtatgacagcgagaccccgtccagccaggcgggcagtcacactg

SEQ ID NO: 1301 - DNA, 358 bp, Homo sapiens
tttttttttttttcccagctaattattttattttgtatttgtagagacagggtctcactatgttgcccaggctggtcttgaactctcagtttccagcagacttcctgcctcagcctcccaaagtgagccactgtgcccagccagagcgtccagttccactggtgttgggtgaggcctagtgagagggtgggcagagggccttgttgaatctgaactgcagcaagggctcgcagatctcaaaggaggcagggaagtgtgctggggtcccgtcagcatcgcatgaactcagggatggctgcatttgaggccagggtcaggctgtcctcacttatcaggggacaagagctggctgatgccg

SEQ ID NO: 1302 - DNA, 379 bp, Homo sapiens; identical to SEQ ID NO: 361

SEQ ID NO: 1303 - DNA, 515 bp, Homo sapiens
gcggccgctgtctgggaggggcccttctgagcgagcggagttcggcgtccagttgtactgcggccagcccagcttctccccatgcagctcgttctccgtgcggagcagtccagcagcggcttgaagtagctcaacatggccgaggcgctcatgttgggctggcccgtgatcagctgcatggcttccggccacggcctacgtgaagcccagcttcatggcggtcgcaggcgctgcccggcctccttggactggtagatgtcacacttgtgcagggggcccgtgtggcaggctgcctggcacagtgcctcgtggaactggaactggatgatgaagctgacgaagtacctgatgtaaggcacgctagaaggaatgtggaacttggcccctgggtcaaagtcaccttgagtcctgggcactgtggggcagaggcctggtacttcagcctgaggctccaccactcctggttatagttctccttggtgatgcttccatccaataccctccagcgcactgat

SEQ ID NO: 1304 - DNA, 358 bp, Homo sapiens
tttttttttttttttttttttaagatgttataagtttattctgaatctcattcaattgtgttcaatgtggctcaattctttacaaattaaaattcttgaatatatgttaaaaattaaacaatcttaatgtttcttccttaactagactggatacacgtctgtttaactacgcaaaaggtaatgctggcatggcttactgggaccctaagtgtggcgaagggactctgctccagtgaactggcgagtgtggaacctcctgacaccttctgaggacctcctgcctgccatgttgctgtggagctcgcactcctcaggcatcccctgatgttgagtgatacaaactctatcaccggaatcg

SEQ ID NO: 1305 - DNA, 274 bp, Homo sapiens
ttttttttttttttttaaacccaaacactctatccttttattccttcccaggctattgcaggaaaagtcttgtttcccaaacgctgtgcctttctcctcttgccttcaaccctggaggggcccaactacacaagtggcttatttggagaagggaatgaggttgaataaagaaagctcagcttccagaacaccacactctcttggttttctctgaccttaaggtaactccttctcagtcctttggctgatttcccatttcccagagagcccaagg

SEQ ID NO: 1306 - DNA, 281 bp, Homo sapiens; identical to SEQ ID NO: 148

SEQ ID NO: 1307 - DNA, 390 bp, Homo sapiens
tttttttaaaccatttgaccatgttatattttaatttgcagagacaaaaatgacaagcaatttatttacataaaactgtacaaaagcaaattaaattatgcaaagtatttcataaatagttggacgagtgtttaatacatttcgccatgttaagcatagttgcgtgcatagtgactcataataaacgatgataaattgttctctgcttcactatcaacatccaagtagcagaacaatagtcaatgattaacattacaaacagatcgtaccacactgaacgcaagtgctttaaactgtaggaaaagtctgaaagtaaaccttaggtagctgaacaaatgatgcttcctccagatgttatcattataccttcacctaggtcacaactcacaa

SEQ ID NO: 1308 - DNA, 442 bp, Homo sapiens
agatttttttccgtgaaatcacttttatttttatttttttccacatagatgacttcatgtcaactacaaaaatcatgaaatgaagaactgattgtgaaactgcaaactcaaaatcactggagtgataaacaggttttcccccagatgacttaaaaaaaataaccaggataccatgaattcatgtttaagtagtaaacatgtcatatatttaaaaataataaatatagaatagcagtacagaaactaatagcataaacagcatgaagtatattttacttttaagacagatgaaatttctaggcacagctttaggcattaaagaggacacagaggcataggttagagtgcactgctctgtacaaaaatacagtctgaataaattacattgctagccatacaattagacgtcacttaccagtcagttcattgcatgtttaataat

SEQ ID NO: 1309 - DNA, 466 bp, Homo sapiens; identical to SEQ ID NO: 151

SEQ ID NO: 1310 - DNA, 421 bp, Homo sapiens; identical to SEQ ID NO: 851

SEQ ID NO: 1311 - DNA, 441 bp, Homo sapiens
ttttttgagtgaaatcaagtgcagttttatttaagaactggaaagaataatcagtatctgtgaaagaaaatccaatttagaatatttaaataaacatttatgtaaaaagaagagtagaataattactccgttcagttcctctccttgcaatgggataggctgcctctgctgcagatggctgggtcttccaaacccatgacaagtgccacggcctctgcagcagtggcccagagagtaggcacttcccagcatgacagagaggccgaggcattctaaccttgccaaaccactacaaaagcaaactagggtgggcaagcccaactacctaaggcaggaagaaagtgcagtgaagggacagtggtgtgctgtgcgtatcgtgggggtatcctaagcagctagctgttggcgagatcttaccaagcctgatcggctaacgcagct

SEQ ID NO: 1312 - DNA, 416 bp, Homo sapiens
ttttacaaatgcaccactatttactgagggttccccacacgtcagacaccctgctaggggagtccccaatgtcatggacatgccaaatgccagtgctcttcgccctctgagtctcccggagtccctgtgcctcctgcagtcagggtgacagtgtcagtcctgggcaagttgctgtgcctgagctgaaggggaggcctcgtcccgggcctgggccccctgccagccactgtctgccttgctgtctctgtccctcgcctcctctggtatcatgcgaggcactggctcatctggaagcagatgctctggatggggttgggcagccacacccgctctccaatctctccccactgtttggcccagtgtttctgtgagaggatcaggacaaaggcaagaaagcccaggaggttcactggctg

SEQ ID NO: 1313 - DNA, 195 bp, Homo sapiens; identical to SEQ ID NO: 157

SEQ ID NO: 1314 - DNA, 263 bp, Homo sapiens
tttttgcagatagaaacagctttattttttccattcaggctttatcaaatagcttgttcaaaaagcatatacaagagcaaaaaataccacatgcagtcaaacttcttttgccttatagtcattggctttcttttagaaaagagtgtgcacttgaataacttctaattcaaacattttccaactgtttctacttcatttttcaagttagcaacgacagatacattttagttaactgtttcatattccttatctttattcatact

SEQ ID NO: 1315 - DNA, 406 bp, Homo sapiens
ttttggtttacaggttatatttattattttctatagtatctaaaaagtaacatatattgttaagactttgttaaaaataactctttacacagctttcggaaggtaactggcaaacaaggtttacaagtaaaagataaacttttcaaactaaaatcagtttgttgtctttacgcaatttacagaagcaagttatgattcaatttaagtatctgaagcagtttccacaataaagcattcccaagaaatagaaaacggagcttagataaagcaccagctgtcacattgtcaccaagttaacactggttcctcactggtctccataacatgatggagagcaggagaagaaagggaaggaacacttagagaggaaaaaaaaaaaaccctgaaatctgaaattacatttact

SEQ ID NO: 1316 - DNA, 123 bp, Homo sapiens
gcttagagaaaatgttttattttcattagttgacaactagttgttcagttgaatggtaagtttcacactgcatcctaaaataagacagatactctgctggcaagtagaaaatagactaatttc

SEQ ID NO: 1317 - DNA, 397 bp, Homo sapiens
ctttttttcattttttagtgcacatatgtcataataaagtaatgcccagctaagtgctataggggaaggcaaagtatgctggctggctataggaagtgacaccatacactgacaatcacaccatacaacagcgccaaacgactattcaaccacttatcagacacatatgaaaatccaaaatgttttattttatttttttttccttaaatagagataaccagtaaacaattttcagaacttggaagtttaaaaacgtgcatataaaaatgggcattatatactttttattgaatgtggattgactgcagtctgctaagaaaaatggggtgtgggagctgaagaaaaaggaagttgtctttttttttttttaaggcttgcttgtgaaaggaacagttgt

SEQ ID NO: 1318 - DNA, 358 bp, Homo sapiens
gttccaaatgtttaattttttaaaatagacaactacctttataaatcatacacctaacttaaatgtttttttccaattaaaggctgatcttaagaaagctcaggggatagcaccagaagataaaggtaagttggcagcttttgtagtgaaagttaattttgttatttaaatacttatcctcaggaaccattgttcactttgccagattttagatgtttgttcaacagacactacagaatgcctgctgttgggccaggcattatcatatagcaatgaacaagacagtcaaagtccctgccctcaaagagcttacattctactcccattcaagaatatagtagtttttcacgttatttat

SEQ ID NO: 1319 - DNA, 311 bp, Homo sapiens
tttaagtgcctatgggctaagtcttttaagacttcaaaatatactcaaatgcttaaattatgacagcaaagacttaatgaaggtgttgagaacggagttgatacaaaattaatacgttactttgatagcttagcagaggcctgcaacagcttttatcaagagtagtgtgacttttgctgaaacagcagttttcttcatggaaggaattttatagcaggggcaaaatatatagaaacaatgaaaaggtttttagaaaaattcccttaagatgttaattatagaattatcttgatcatttgcacaagaatttt

SEQ ID NO: 1320 - DNA, 350 bp, Homo sapiens
tttttttttttttttttagtcttctctaattttattacagggcatgttggggacacgggagggaagtgttagaggagtgacagggcagcccggggccctctcccaccctgagcctcgaggcctggcgggggacatgaactgcagaggcatcagataaggcctcagaaagcccaggccatcattttccatgggaccaggctggctcaatgtggaactggccctcccagagcagcaggagaagggctcgcatgggctgcccccgtcacctgtgcctgacaggatggcggggaggcagagagagagcatcagacgccctccctccccataaggggcatgggggatggggacac

SEQ ID NO: 1321 - DNA, 374 bp, Homo sapiens
ggttgcaacatgtttaatttctgctgttcacactggacactgcatcatactagtgtcggcccctgaggcaccccttcctcgcctgcacaaaggaggacgagagatgaacattcagaggcagaaaagggcaataaaaaaagagctgtgtatgtgacctccaactactcagaggtgggggaaaacagccccatctgtcttgcactaaaaggctcaccaagggcaggtgaggggcaaatggtaatactgggagggggtaacacaaggagaagcgacatgagtacaccaagatgtcaaagctgcgacgggctggatgagggagccccaagagggcatatgctcagggtgccagccggctgcttttccttgtgacagcc

SEQ ID NO: 1322 - DNA, 395 bp, Homo sapiens; identical to SEQ ID NO: 161

SEQ ID NO: 1323 - DNA, 288 bp, Homo sapiens
caacaggaaatatcctttcctatatattgtgctattctgtattcactaccttttcagttttttttttttttttttttttttaagttaaatgcttttcagtaatggattctcccaggcactaaactacttaagccaggagtataactacttcaaatacactatgagaacctaaacttgggtctctggagatctgctgccagagtctacttgttctaacctgtgtatgcgcaagatacaccacattataatagttttgcatttgctatcatacattagttatgtagaatc

SEQ ID NO: 1324 - DNA, 207 bp, Homo sapiens; identical to SEQ ID NO: 374

SEQ ID NO: 1325 - DNA, 418 bp, Homo sapiens; identical to SEQ ID NO: 375

SEQ ID NO: 1326 - DNA, 328 bp, Homo sapiens; identical to SEQ ID NO: 165

SEQ ID NO: 1327 - DNA, 357 bp, Homo sapiens
aaccaccattgtctacacctttttaaaaattaagtttgttactaaaagtccaatgtcattcacttgtatttatgatcatcaaatggtaattagggcaacatatgtaaacgcatgcctctgaatcagattcatgcagtgttaattatctgaataatttatgacattctcccaggttatttgaatggtatctttggagggcttactcaaatgaacccacaatacctccactattacagcttataggaaattacaatccactttacaggcctcaaaggttcattctgtggcccaaagcccatggaggggaagggatctaaaggtgctcatgtcaagttattttacttgttttttactgtc

SEQ ID NO: 1328 - DNA, 379 bp, Homo sapiens; identical to SEQ ID NO: 376

SEQ ID NO: 1329 - DNA, 317 bp, Homo sapiens; identical to SEQ ID NO: 857

SEQ ID NO: 1330 - DNA, 378 bp, Homo sapiens; identical to SEQ ID NO: 167

SEQ ID NO: 1331 - DNA, 199 bp, Homo sapiens; identical to SEQ ID NO: 859

SEQ ID NO: 1332 - DNA, 395 bp, Homo sapiens
aaagatgaggatgcggactccaataaaggcattaagaaagtactagatgaaaatgagaaatatgtgaaggataacatgtgaaatgtacactcaggtctaacaaatacctattatttctctggttaagaaggtttagcaggagcctccaatgagcactgtatgtagagaaaagggaaggagcaggaggaggaacagatctgcacagaatttttttcttaaaaaccacaaagggtgacttttttcttctaagcaagcaagcctgagaggcattacatgggctggctcctaatatcaaaacaaaatatttctttgccacaaaggaacttgactatgtagcaacacatttacaaaactactgcaaaacactcccagagggcagtgacctactctgctcc

SEQ ID NO: 1333 - DNA, 529 bp, Homo sapiens
tttttttttgtcccctttaaaacaacaaaggaaaaaacaaataaccagagatgacgatcgaggctctacacacgtgctgggtttccgtaggacatgctgctatggaaacgcggtgcagcagccccccagaggcgacgcggcgcgcatgcgaggtcgagcgatccaggcagctactcgggctccatggcctcctccggccgcagtggatgcatgcgtgcgggggagccgggggcgggggcccagcaactttccacgcagggactgcctctcacaagagcacttcctcctcccccacggggggcgggtcggtgccctggaggttgtcttcgctgccttgcttcgtgagcaagtttccaggcgctgacagtgagcgttcctcccgccggctgccctcgaatgggttcccaaaggagcgtttacgtatcatggtcttcaccaggatcacggttgccaagctgggaatgtgtttgactgagttctcgacctcctcttcagtcacttcgaccagcgtgcagttctcatcctccga

SEQ ID NO: 1334 - DNA, 428 bp, Homo sapiens
caatctgtagctggagctgatacaatacaatgtttacctggccaaagagggttcgaggggacaagctggcctcacaataagatgcacagtgttagctaggtcatcgtgacaggcatgcctcacaccaagacggactatcaagacctgagccgacctgacttacataaatgacaaacactagtgctttacaaaggtggctggagttctccatcttctaaaatcaacatccaatccccttcagtcagcatcttcagtattcccttgaggactggaaaaccaaagcagctacgtccatctgtaacgcacccgcaccggacaggcacgagatgtcacgtccacctggcaccatccaaagagggtaaattggagaaatcacacctttcaaatgttaatctgacactgtaaacagcagttgagttctcatttac

SEQ ID NO: 1335 - DNA, 461 bp, Homo sapiens; identical to SEQ ID NO: 860

SEQ ID NO: 1336 - DNA, 252 bp, Homo sapiens
cacaggaataataaatttattataatcacagatggtggggtagtgcacataaaaaggggggacctcttctcaccagagggtgctggccggtgcccagagtggcaggcaacatagggaggcgctccctgcatggcccggcccgctgccaggcccgctgtctctgggtgctcagtgtgtggtgctctgaggacacgggtcctgagggccttgctcttcatccttcacagtggggacacggccctcatgccagcg

SEQ ID NO: 1337 - DNA, 423 bp, Homo sapiens
tttttttttgtattgcaaaatgtacagcatttattcacatacagacaaaaaggcacaattctactaaatagttcaacaaaaaaatacagctgtcctcaactagttttataaatactttcaaaaagggggtagaaataaatacaggattgggtcatgtaatataaaatagtcatctctacatatactttgatttttaactcttcatgcacctttttttttttcaattttagctgaatggacaccaagctaggcacatagtgaaaaatcctctgtacaaggttacaaatgtaatgacaagtttgtccatttcaaaataagatttgtacacaacacataaaacccttcatttagatcttgtgtttataacctaacaaatgacattccaggcaactttacaaaagtttaactagcctacattttgac

SEQ ID NO: 1338 - DNA, 454 bp, Homo sapiens
ttttttttttttttttttttttttttttttttgcagacacagacatcatgtgaggtatttattttgcagccattcagttcagctgtccagtatcaggttaccaaagacaaattttcaagctcccggttaatccccaccaaagtttctactgttcggctacttcaggatggctaacatttggagagaagaggatcccccaggtagtctgtacataattcagagagaggacatcagaattttccatggttctatttcaggtattaaggtaccacagtgaagcatgtcatttgactgtggtggcaaagggacggcactgagcatgcctaacctattccccggcatttcagtccaatcagcgcatgctcgcaatgatcatccatgggtgaaaaggaagagctgaaagacacatgtgctgagcaacatttaatttctgcttgttaaacgggtgattagg

SEQ ID NO: 1339 - DNA, 488 bp, Homo sapiens
tttaaccggagtccggttggttaattgaatgcaaattcattcatagaaaacggaaatgcaaccatagcatggagacgctctgagaaaagatccagacccacttcatctcccagcccttcaagcagactattaaaaaaaagtttgggagaaaaacacattcccatccccaaagcagaggccccgcttgagctcccccatcctcagcatctggggtggaccaggtgggacgaaggggatccaaggaccagggtggccagggtgcccagagctggggcaattctttgtaaactccaaggtttcataggtatgtgtgtgcatgactaacacagaacttgcctgaagactggacggaaacttagaagccagccctgggtcctagagcgaggctaggactgggcacgtagagggaaacagcacatcccttcctgaagcccctttctaaggtaggcactggggtgccacagctatggaggcagaacgggctgaac

SEQ ID NO: 1340 - DNA, 383 bp, Homo sapiens
tttgaacataaaaattctttatttaacctaatccagccagtattgagatagtttgctatattaaaaacaagacgtttaaaaaaattacagcaaagttagcaaggcagtgactaattaagtcactaagtttaattttatattcttcacagtcatttcataatcatgtaatggtaaacaatattttcagccactttggagataagttaacttttgaaaagaatagaattctagtagtcgtcattgaattttataaaagaggtttaaaacattaaagtttccagaaataacacagtaaagaaatatgaaaataaactggaaaataaaatatacccacccatccgaaaaatctacatcatctctttcatttgtccccaatgcctttc

SEQ ID NO: 1341 - DNA, 310 bp, Homo sapiens
agaattaaatctgacaggaaaacctaggrgtttttattagtaccattattgttttctttggctccatgtattatgtcggtaaaatgacaaaaaaaaaaaaaggaaaaaaattktaaaagacaaatattttgtacaaaaatacaaagttttaaaagctctttaagtatatyccatattatyactaatagtyggccyatatatcttatgcctgcatatttybcctacacttggwttttagaaatgtatggcactktttacacagtatatgcttavgbbctycccataactcavsgcccaatgatamcctttt

SEQ ID NO: 1342 - DNA, 297 bp, Homo sapiens
gattatgaagacttttattaaattacagtgtattacagattatatcataataataagcctttcatctttaggctaatatgatacaaaaacctacttggccacattacttcttgagtttcttttgggcagctttcttcttgaccatctgtaatcgcttcatagcattgagctgtgattcttgtgaagttgggcctttaagggatgctgagggagagctgctggattctgaagtagttttgctggtagtacttccactaggtcctgatgttccactatttccattcccacttagttggc

SEQ ID NO: 1343 - DNA, 298 bp, Homo sapiens
gggggtggcagtgcactttattaacaaacaaaacagtaccatacaggcaaaatcttacttcagtggcaaagcacacacataggtatactccaacgtgtagcactggggcaaacttcagacatggaacattaggcaccaagttcacaatcacactaaacatagttcacaatccttcaatccatactcttcagtggaggatgaggccttatttaacagttaactgggacagacagatgaagttttaaaatctaattcttggcctaactgtggagtggggctgactcagccttcagaactg

SEQ ID NO: 1344 - DNA, 265 bp, Homo sapiens
  misc_feature: n=a,t,g or c
gaatgaaaagggcttttactttctttttaaaacaagtgattttnaagggtttgtagaaaaagcaaagaaaagcataattctcctcttacttcaagctagtgtctgatgagaaagtaccaggctaacctctgaagaatcctaccccaacaccttcttctttcttctgctgggatgaacatctaggggtaagatatgactgctctctaccatctggggacttctcttctttatattgttgcattcctcaatctttgcataaggaaga

SEQ ID NO: 1345 - DNA, 305 bp, Homo sapiens; identical to SEQ ID NO: 201
  misc_feature: n=a,t,g or c

SEQ ID NO: 1346 - DNA, 243 bp, Homo sapiens; identical to SEQ ID NO: 203

SEQ ID NO: 1347 - DNA, 375 bp, Homo sapiens; identical to SEQ ID NO: 391
  misc_feature: n=a,t,g or c

SEQ ID NO: 1348 - DNA, 238 bp, Homo sapiens
  misc_feature: n=a,t,g or c
agcaatacatgtttatcatagaaatttaagaacctaagtaatacaaagaaagtaaggattacctttaattaagaacctaagtaatacaaagaaagtaaggattacctttaatcaataaacaaagataaacttttggagggagcatataccattccagtcactangtaaggttttaatattcagattccagaattctgatcaatcaatggctatgtttcacacttctttaaattaaaaa

SEQ ID NO: 1349 - DNA, 377 bp, Homo sapiens
  misc_feature: n=a,t,g or c
ttttttttatttaataacattgtttaataaaaaactacatatttaacagaaaagttgttaaagctccaaggtaaaggcacattgaaggagaatgctttttaaatccaattttcagggaattcactttacatgtaaataaagcagaaaatgcaggaaaattattttgaagtttttcatcacttaacaatttctgggaaacaaagttcatcctattttcccatagaggacccctgttaaaatataagattatattcccctatactagggattcaggcattcaaataaatcactagtccaacttcaatgtcgtaggaacccnagaanaatataactatcctaaaaatatataatttaaaatattaatttataggttatac

SEQ ID NO: 1350 - DNA, 478 bp, Homo sapiens
  misc_feature: n=a,t,g or c
tttttttttttgttttttccataccttttattgaactctgcagacttcattaagggaccatttgcttagaaattcttaaacatttggacatattttacaagacaagacagcagctggaggtcacacaaagatcacaatttcatctcaccacatgcataaaaagacactgggatttgtgtgtgtgtgtgtgtgtgtgtgtgtgtgtgtgtgtgcgtgtgtgttgcgcacatgcaatgtcttattttcacctttacaggaaggactagagacattaactgacgagagatgaataggacccacgaatgcacccccgagaaaagagtggctgaggacattgggtcatttatgggctaatgtgattgggcttggcccctgttcaaggttgaggtgatcagaatggntttactgggcagaaaagccccaacctcacacgacgggtttcccggggagagacagggtcttagctgatggggatctg

SEQ ID NO: 1351 - DNA, 367 bp, Homo sapiens
  misc_feature: n=a,t,g or c
taatacaatcgtagtacagntatgaagtcacattcaatccactgaatatattcaaggtattaataaaaatattatacatctttattcactatcttaatataattaaagtatttggttcttataggtaagattaattaccatattcattcatatatgcactgctagtcaaacaacatgggaaatgaatgtatgggattatgatagtgggggttcagtcctttttgatctgaagtctaagtttcaaaagtgaatgttttcttttttaaatgtcacaatatttggaatcctaggaaaggaatagggccaacctaatttaagggcaagggtattggaaaccttttataccaaccttttaattttggaaaaa

SEQ ID NO: 1352 - DNA, 475 bp, Homo sapiens; identical to SEQ ID NO: 866
  misc_feature: n=a,t,g or c

SEQ ID NO: 1353 - DNA, 347 bp, Homo sapiens
  misc_feature: n=a,t,g or c
ccaagnaaantnattgtattctccctaacaacaacaaaagagacctaaatgggctgctccctgaagagagccctcagctcttttaccgtgatgcacactcggggctgggtntaggctgtgtgatcaaatgtatgaaggaagaaggaacggagagaacgtgggcaatcaaggcctgggcactgccctacaggaggcttacagggtcacactcccaggaactgtctctatccccatgcctctcctaggtaaggattcattacctatgggtttcaaaggaaagtgcagtttctaggggagtgaggggacacggtggaaattccaggaaattaaagggccaggnaaaccac

SEQ ID NO: 1354 - DNA, 400 bp, Homo sapiens
  misc_feature: n=a,t,g or c
agnntngagnntcccgcctntttattacatcccttatgcatacagaattcacactgatttcagttaaaagtcaaagtggcatgcaagtagggcaagggtggcccctacataaatatagacatagccatttgttgagaaatttaagtgttcaaaacataaccaagaacacttatcaggtattgaaaagctagaggccagccacttctggttcttagttccccttgtaactccttataattttcaaatgaggaagtatcagtgtattctcccaaaccactctaaattcattaggtaacattttctaccatccttctggcaaacattttacatacatcatgagggaacaaaaggaaaggtttcatatataactacgggctcccccaaaccaattggctactca

SEQ ID NO: 1355 - DNA, 414 bp, Homo sapiens; identical to SEQ ID NO: 207
  misc_feature: n=a,t,g or c

SEQ ID NO: 1356 - DNA, 333 bp, Homo sapiens; identical to SEQ ID NO: 208
  misc_feature: n=a,t,g or c

SEQ ID NO: 1357 - DNA, 372 bp, Homo sapiens; identical to SEQ ID NO: 392
  misc_feature: n=a,t,g or c

SEQ ID NO: 1358 - DNA, 279 bp, Homo sapiens; identical to SEQ ID NO: 867

SEQ ID NO: 1359 - DNA, 459 bp, Homo sapiens; identical to SEQ ID NO: 220
  misc_feature: n=a,t,g or c

SEQ ID NO: 1360 - DNA, 413 bp, Homo sapiens
  misc_feature: n=a,t,g or c
tttttttcaccaaggaagaaatacctttattaggagtctaggcatgtcagaaaaacccagttcagtcacagaaaaggaggcaaatattggtacagagcaagaatccaagtgtgaaaataaaacctccatctaaatatcctaacagaaatgctgctgaatttagcccaggtgaaacttctgaaagcncctggtgaaatgagatttttgcataaagagagagctctccagcactgctgcatctgagcttcttataaagtgacaggtcttggccagcagtagaggaagagataaaggggatgtctcatcacccaagcaaggtcgtctgtgttcaagtgagagaagaaccttagggttttggacagagtaaactggggcagcagagggaaaatggctnaggaaacnccacgtctagg

SEQ ID NO: 1361 - DNA, 262 bp, Homo sapiens
ttttaagcaatgaaatattttatttgctgaaataggtataacacttaaataaaaattaaacaaatgtttaatatctccttccatgaaacagcagcagcaagagatagcaagtgttcggaagtctcttcaatccatgttattctgatgactctttgaagaaagaacttgaacctcctgcacagggggatttccttcactcatagattcccctaacttcatctcctcttttccttgggctattagtcagtcaatatgcttgtga

SEQ ID NO: 1362 - DNA, 445 bp, Homo sapiens; identical to SEQ ID NO: 221

SEQ ID NO: 1363 - DNA, 473 bp, Homo sapiens
gaaggtatttttaaaatctgggcacaccatatctatctgtaggaccctgggtcaaaggtcctacataactgatatgaaccataattctccatattaacaaaggctcggaaattgaaaccaagatcacctaactcgctcactttggccaatatagtacgaatttcagcttctttacaagagaagagtcctgagatgttaatatgcagcaattctgctgatgtgcattttaactttatgcaccaaggaagaaaggctaaggaattcacaaaagtaaaatcaccccctgaaaaacagatgctggtgattggagaaaaaagagcagtagaattaaggtgttttataaaccagagagtgttttgtttctgataggtaaagggatttcttcatatgttattttaataaaagggaatttcataggtaaaaaccaatattcaaaattataaaacaaatagaactgtttgtgcacaatcact

SEQ ID NO: 1364 - DNA, 378 bp, Homo sapiens
atctgtaatagtttattttaaagactttacatttacaagtagaaacaacatgtgttatctgtgggtaaggtagagcaggaactctaatccaagggtgggggagatcagttggttccttcacagaaaataagcctgttgtgtgggcatcttgcttgcctgtagatctttgttcccagttcaggaggtttttattcagtgcttgcttcatttactggaaaagttcactgggcccacctgtcaactccttcccccacagcttccagctcagcagcaaactgtagggaacagatttactccccagttcctactgtaaataatgctttaagaacagcattccttttggacagtatgtcatagacccaatttttaatactccca

SEQ ID NO: 1365 - DNA, 387 bp, Homo sapiens
aatatagaacagtcaggttttattacttttaagtaataaagagccttttccttgcttttcttttttccctttttttcttttcttttttcttttcttacaacatacattaagtcgtgaatcagatgttaggggatgtggagatggaaggaaaattcggtgacatcacaatatttttacaactttacaacaaatataaatctgagtttgttgcatctaccagtgtctagcaagggtggaaagcaaaggcacactcgggtttatggaccctccccccacacacagtggggaaaaaaaactggggagaaatacttaaatgcagaagaccagctcaatacatgtgggtattttagggttaacaccagaagtgatgggttgtgggggtgtagg

SEQ ID NO: 1366 - DNA, 396 bp, Homo sapiens
  misc_feature: n=a,t,g or c
catggtacaaaaatgtttatttaaattaaatatttgcaacaaattaatattgacaactgttccaaagtatgagttgttctttcaaaaaaacgaaacagtttagcttaatgtctgtgatactgttttatgagattattcatacatgctctggactgcgcatcagtcaatcatatcatcaacaatttactatttattaccaaatggcatataaagtaatagcataaagagtaatcataccttataagtgattttacaataggacatcttagaaggacaaaaaggatttatcaacaatacaaaacataagataaaaataataggagattatataanacatatttcatacaggaaataatatggctaaaatccaaaaaaccaaccaactggtctttcagc

SEQ ID NO: 1367 - DNA, 419 bp, Homo sapiens; identical to SEQ ID NO: 230
  misc_feature: n=a,t,g or c

SEQ ID NO: 1368 - DNA, 268 bp, Homo sapiens; identical to SEQ ID NO: 398
  misc_feature: n=a,t,g or c

SEQ ID NO: 1369 - DNA, 320 bp, Homo sapiens; identical to SEQ ID NO: 400
  misc_feature: n=a,t,g or c

SEQ ID NO: 1370 - DNA, 454 bp, Homo sapiens
  misc_feature: n=a,t,g or c
cagttgcagttgaactttattcatccgttcacacctgggtccctcccggcccccacctaccctggccctgcctactcagggcttccaagattgggtgtcggggtggctttgcttatcctccagatgccttcttcccaggatgtgatccgtgccctccaggatctaagggatgaggactaaaggggtctgttcctcctccaggcagctggcatggaaccgtccgtctcagcggctgcttggtggttgccgttttgaatggntgtggctctctgtttgctggggggtattctgccaggatgtataggaagccacccagggctgccactgctgtgntngtgttgtgggaggagcagccatctggaaattgtttttctcgcctcttcactctcctcgaaaaatgctgctgatattgaatagctttagataattcttcatcttcagcatcaggctcccc

SEQ ID NO: 1371 - DNA, 527 bp, Homo sapiens; identical to SEQ ID NO: 236
  misc_feature: n=a,t,g or c

SEQ ID NO: 1372 - DNA, 529 bp, Homo sapiens
  misc_feature: n=a,t,g or c
ttttttgactagaaagggagcactttaatgaacagaagtacagacgtgctggcaaggatggaaatctccactggttcctggcccccttcacctccatgcatccccagcatgggtgttaatcattacccaagctctcgctgttccccctcaccccctgcagagtccagcaggtctagatacgtgctctttgaaatgtgttctgggattaaaaatggtgccctgaggctgtctaaccctcacaaaagacagacacatgcacacacgggccttggggagggctgtgtattagcagtcaggtgggccctcctgggagagcttgctcaagaactcttctcggaaggaaacccaccttaaggtagggttctgataggcagantcccagagggacagccagctgctagaagatggggttatccagggtttgtaaggtttaaacaacgggcagggagncaaacgagtcaaatggtttcctcgtgcgaattttggctcgaggcaaattcctatagtgagngtattaaatcgtaacatg

SEQ ID NO: 1373 - DNA, 215 bp, Homo sapiens; identical to SEQ ID NO: 240
  misc_feature: n=a,t,g or c

SEQ ID NO: 1374 - DNA, 440 bp, Homo sapiens; identical to SEQ ID NO: 242

SEQ ID NO: 1375 - DNA, 378 bp, Homo sapiens
  misc_feature: n=a,t,g or c
tttnnttnataggatcttcctatgtttcttaggctggtctcgaactcctgggctctagtgatcctcccatctcagcctcccaaaatgctgggaatacaagcatgagccacagcacctggccagtaatattctttttaatattaatattctttggctcattaatcctactagaaatctatcctgaggtaacaatcagaaatgcaaacaaatttggttcaaagatatttacttcagcaatatttatgatgggcaaaaccaggaaatactacatatgtccaataatagaggggccagttaaataaataatatacccgttaaataggaccatttatacaactgtttaaaaatgggngtgttccaaattttaaagggggttan

SEQ ID NO: 1376 - DNA, 460 bp, Homo sapiens
  misc_feature: n=a,t,g or c
tnnnntnttcagacagggtctccctttgtcacccagtctggaatgcagcctggcaacagagcaagactctgtctcaaaaaaaataaaaaaggagcaaggagatgactaacaggtactggaagccatgctacaaaaccaagaaaggagaggcagcttttctttccctcagcacagaagaggggaaatgcagttgcatgggggctaggggagcggggaatgaaancgggtaggaagggaaaactcccccgaattttatagcatcccactttcacagcagcttaaactttttaaacattacttcacctcgaggatggggtaaaccncttttctcttgaatggggttgccctgccatttctcccttttgggcccccacccccacacaaggnccatctttgatccacttcctnagggggggnaatcaggttcttccaagggggatttaaaatccaccattacccc

SEQ ID NO: 1377 - DNA, 418 bp, Homo sapiens
  misc_feature: n=a,t,g or c
agacaagccaagaaatatgtttctttattttcattcccatatagcagagatggaaccaggacagtgatgctggaaaagcctgcctcgatcaagtcatcacataagttaatgtcagaaaacctgtatttgaatttgactcctctatccttactctggaaaattggacatcttgacccagtggctgtgagggctaaattagatgatgcagaaagtgcttggcatgcagtagatatgcaaaacaataacttatgacactctccaagcaggggaaaaaagtcttcatgccttctaactaataatacaaacgtatgcagtgtctttccaccctggggctttgagttttaaccaaataccaaattggaatagggnaaaattaggtccaaactcccattnaaccaggttttattaccanttccaa

SEQ ID NO: 1378 - DNA, 177 bp, Homo sapiens
tggaaagagctgggggagcttaagcagcgagtgtggccctctgcttccgggcacgcccacagcaactcggcttcagagtctgacccgcagaagttctttaaagagagggacttagggaccccagatcccggcagccaggcccagagagggaagcaggattagtcaaaaacaggtgga

SEQ ID NO: 1379 - DNA, 320 bp, Homo sapiens
  misc_feature: n=a,t,g or c
tgattnnaacaaatatttattgaatacctactatgtctgaggcactgtgtacaatgaagaataatacaaacacattgtactcccctagagctacaggttagctctgggcacagtaatacattattacataaaataatgagactgattttcttgggtggcttatgaaacctaatcccattttatgtgagcatttggattttgttcagtgctcttgacatcttcataaaccacctgatcatgcattatatagagacattgtttatccttttttcacgtggggcccatcgaggcaaaaacttgactaggaactaggttggggg

SEQ ID NO: 1380 - DNA, 291 bp, Homo sapiens
taattactttattgagcatctgcaaggtgcacatcattgtacatagcttgaaaatgtcaaattgagttttgtcacaccctctgtaaaggcttccctaatttccatggtttcgtggtttttcttcctctgttccaaggaacatgttattagtacctttactgcagcacttacttgtccttcatgtgttacgattgtaccatgtgttctctccactaggttttgaactcctcaaagatgaaatccatgcattgttcatctctgcaaccttgatgtccaaatacggtgttttga

SEQ ID NO: 1381 - DNA, 195 bp, Homo sapiens; identical to SEQ ID NO: 404
  misc_feature: n=a,t,g or c

SEQ ID NO: 1382 - DNA, 384 bp, Homo sapiens; identical to SEQ ID NO: 246
  misc_feature: n=a,t,g or c

SEQ ID NO: 1383 - DNA, 301 bp, Homo sapiens
tttttttttttttttgaacacttacatccatttatttgggaaattgcttcacctgtaaactcacaactgataaggcacattattgcaaaactgtcggggtggagggagggaggcaactctaaggatcctgaaaaggggcaaagggcacacacttgcgatgatgtggaaaacatgtttctccttccctccccctactccagaacaccaaagggccacagtcttcaaagtctgctgcctccttcccccactctcgttatcaaggcttcttttaaaggaaacacgttttaaacaatgaaatcct

SEQ ID NO: 1384 - DNA, 293 bp, Homo sapiens
  misc_feature: n=a,t,g or c
ttttttttgttttacaccaaccgctttttattatcgagtttcagaaacctttcacaagatggtaaaaaaaaaaaaaagaaaaaagaaaaaaaaaacaaaaccaaaaacaaaaaaactttacaaccacagctaatgtaattttttccattgttcccagtcagctccaaacccattgtgtgcaaagcccatttttttccatggcatctaaatgatnggatacagggctatggaaattctttattctatttgtnggcaggcttatgcagggtgcaggccaaacacaaggcttcggg

SEQ ID NO: 1385 - DNA, 291 bp, Homo sapiens
  misc_feature: n=a,t,g or c
ttttttttacatcaaaaaccatactttattttatgtatagcaatacaatttacatattaaataacactataatagaatgatttgatatagtttaaacagaagaaaaagggaaaaatttcaggttacaaaacccctccccctgaacaaatttaaaaaaaaaaaaaaagcacactttttccaaatgggtcaatgtgacgaatgttttcagtgactaattatgtctaattcctattgcacaaatgggncaatgggaattaaaaaggaaaacccaactttcacaatcactggcct

SEQ ID NO: 1386 - DNA, 340 bp, Homo sapiens
atctcagacaaacattatgtatctttatttaaatttgcaaatgaaaacaacacatatttcatgttagttttaataagagattccctatcctctgccccagtaaaacctaaccaagccagcctgacaggttatatcaatacagggagctggagtgggagccaagggtggtgttagataggggtggggtacagatcaagggggcctgggagactcagtgactggaagtctctgcccctcactcttgggtgagtagctaatttcagcagctggcttcataaggaggagtcaggggtgggtggaggctcctcccaattccagatccacttcctcttctccttct

SEQ ID NO: 1387 - DNA, 434 bp, Homo sapiens
  misc_feature: n=a,t,g or c
gctgtatcataanntttttattagaaggcaatgtaaaagagtattgacctacacagttaggccagaggtactagccaatctccatcctccaagaaaaatgatctccagtggctcagagcccctcagtccctgtccagaggccgttcgcctgactgggactggactgaggtgggcgggggttccaggagggcataagattcctgacgggacaaatatgtgtcccagggctaaacagaactggctggaatgtttttcttacctcccatttctacttcattatgaaaatggtggactgggcagcagtgaatgggtcgatcttgtgtgtcaggttatgtaattacataaacgactgtattagctttctggggctatagtaacaagtcagcctgaactcagcatgaactaagcagctttaaaacaacagactttattct

SEQ ID NO: 1388 - DNA, 262 bp, Homo sapiens; identical to SEQ ID NO: 252

SEQ ID NO: 1389 - DNA, 439 bp, Homo sapiens
  misc_feature: n=a,t,g or c
antttnggaagttaatancnctatgagtaaatttattggaaagtagactcataagcatgtaagactggccaagaaagtgaatgtcaagagaaagaaggaggagtcaatggctgagggatgcctacggtagtgaagagaaccactaggagaatcaagatctctttcatcctttctgcattcctccacagtgctacaacacactccaaggcctgtgtgggagcagttttcccagaggatggaggcaagttgattctgagtttcctattttaaaacaaaatctagggtttgactttattttctgaagtctgggagaagtcttcatcttgggtacaattgttgtgataggaggtagggtgacagtgagggactnaggggggcagctcagcttttctcttagggtgggctgcaattcttttttgcaggtgagaccaggggcaca

SEQ ID NO: 1390 - DNA, 230 bp, Homo sapiens
  misc_feature: n=a,t,g or c
tgtgtgtgtggctgaaaacctgttatcaatttcacatgattcagtctaacatgaaataaaacaggatgcactgaaagggcagagaaacatcagtaaacattgaaaatatggcaggaaaagtaaaanggtcgatacaaagttggaaaatacagtcaagantctccctgagaaagtgtaaganagancagggagacaggcaggangggaaagaaagaaaggaaagttgaagg

SEQ ID NO: 1391 - DNA, 384 bp, Homo sapiens
  misc_feature: n=a,t,g or c
ctttattaaacatcattcactgagaatttccaaagcactgtgtggttgcctagacctgtgtaccagcgctctgggggtcgggagaagtctaaggcacgggccctgcctggcgcacggctccttctccctgggaaggcagctccactggtgaaaggccactgaccaagtccagaccctgaggacgacgaaggcctcggggcagaagcctgagagantcatgccccactggcagtgggaggcggtgcaggctgggagccctgcccagggccccaggttgagctntgggggaaagctatgacccagtttgctgagagctgcaatgacgaacattgggctctntgcccagaggcccaaggaagggccatgggacttgggctgggcctt

SEQ ID NO: 1392 - DNA, 199 bp, Homo sapiens
  misc_feature: n=a,t,g or c
gaaaagctagtagtttatatagatagatatatagatatatagatattgatagatattgtgtttacatagtccacaagttaaatgcaggtatccataagangagcattaacaataaaaatacaatctgtgtgtngccaagtacagagacttaaaatggtaaancagcaaaaaggntctcacaaaagtacaaatatacagt

SEQ ID NO: 1393 - DNA, 295 bp, Homo sapiens
  misc_feature: n=a,t,g or c
gtgggtgaaaatgacagatttattcaacttaaatggtcaccgaggctacagcagaaccaatgctgttacaataggcaagcactactgtcagcagcaacataccatttatttcttcaacagcatctgagcctcatgggttatgttttcattaaaaaaaaaaaaatcttataagccagttgggaagctgttaaaggccaattttaaatggcaatgtaaaacaaatttcactgaaaatacaattcaaatacaactgctatgngcactgtaagaaaaactgactagttactcagatata

SEQ ID NO: 1394 - DNA, 319 bp, Homo sapiens; identical to SEQ ID NO: 257

SEQ ID NO: 1395 - DNA, 259 bp, Homo sapiens
tgaaaaagtttcattgtttaaagtccacatatttgacaccttgataaggaaaatgtaaatgtgtcatataacatttattccatcaatttaaactgaagtgtctcatggagctaaacactaaaagattttaaataaaaaagcagtaacctgtatgtacacaaaatgatcattccataaatatttacatgacaagggaaaaaatggagaatcactaaaactggaaattgctacaggtgtgataatcctttctcatgacact

SEQ ID NO: 1396 - DNA, 339 bp, Homo sapiens
tctggcttcaaaactggtcctctctggtagaactgatcactctagttatttggctatattaatcttccttcacaatgcttaaagattcttgggggcaggaaactgtcacacattcatctttgtcttctcagtagtgatgtgcgtaagtttgactttgacatatttgccccaaatctgctatgactttgatttctggcacaggaaaagctgactgccctttcaacattctttttgggaatccctgatttgtgctttattagtgctcctaatcataattaaccagcatatcaatgttagtactattaaataaacataatatttgaatttactacaattatc

SEQ ID NO: 1397 - DNA, 435 bp, Homo sapiens
  misc_feature: n=a,t,g or c
ccagtanctnnacataagggaaattaatcagttaatttctgctgacttaggtttcctaaacagcttttagttctcaaggcacagctgtggtaaaaacagagcaaaacacccagccatttattggaattctgcagtacaaaataagcacatgtctctatataatctagtaacaggatagcaacagttaaactgtctcaaacaacagatgtatttgcttgattttccttcctaacttcttttgcatcaggaccgcaagcaaagagcttgtttcccagagtattttggggcaaatcgggaaatacataatgtgggcccattgccacaaaagggaggactggaaatcaatacggaggcaaggcccaaaaggcttcagggatttgggagccggggggtggcccatggatggaaatgccgggaggntccagggaggntagg

SEQ ID NO: 1398 - DNA, 375 bp, Homo sapiens
  misc_feature: n=a,t,g or c
tttttattggatttaaatattttatttaaagaaatattcttaaggctgcagtttattgataagaaaaatataaagcatacatgtttatagattatgtattgacattatagtatatagattctccaaataacataattaattttgtagtgctactagtggaatgcattctgcagaaacatggctttaccttcaaatctaagcacaatacccttacatcaaaaatgaaggataataaaagcacaactttgactcatttaaattttgggaggccacatctggatttgttggagggggtaaattcggtttatttccctcttcaggggaggncattattttttgccatctctttcnggggcccccttttatccctnttaa

SEQ ID NO: 1399 - DNA, 523 bp, Homo sapiens; identical to SEQ ID NO: 261
  misc_feature: n=a,t,g or c

SEQ ID NO: 1400 - DNA, 298 bp, Homo sapiens; identical to SEQ ID NO: 262
  misc_feature: n=a,t,g or c

SEQ ID NO: 1401 - DNA, 495 bp, Homo sapiens
  misc_feature: n=a,t,g or c
gtggagatggagtatgtatttattttacaaaaataaatcaccatcttcggaccatttgtagactggaacatttcgagcaatgagtgcgccacacggacgagtgccctggtgactccctgatgttcgcgtcacccccagggccaccttggcgcccgcatgagcctcgnttcccactcccggcctccaactcccttccctcgcagccgccattcaccttctgctgtttatttgtctgcagangcctgggacaccggaaaaggcgattccctgagcgcctgggagttggagacaattcctggttcagaatttaaacatctttctaggtaagcgntgctccaaaactcttcgccgcgtgggacttttgcaccaggggcggttggggagganttggccctccacggttcctgggcaaccgcggcctttttgaaagaggttctggtcaatatttaacttcggaggaatttggaattggattcctttaagttcttnccctgc

SEQ ID NO: 1402 - DNA, 477 bp, Homo sapiens; identical to SEQ ID NO: 871
  misc_feature: n=a,t,g or c

SEQ ID NO: 1403 - DNA, 308 bp, Homo sapiens; identical to SEQ ID NO: 412
  misc_feature: n=a,t,g or c

SEQ ID NO: 1404 - DNA, 238 bp, Homo sapiens
  misc_feature: n=a,t,g or c
actttatttcaaaaaatataaagcacatatgacaaaacattaacacatgttatttctgggcggatggtacttatattttatacttttctgtatttaaatttttcaaaataaaataatgatcctatatacttttaatacaaaatcacatatgtagggcatcactttatacgcagggaatctttacaaaatgaactatgtgctatcacaacaaactccttaggnacaatagtttntaaca

SEQ ID NO: 1405 - DNA, 397 bp, Homo sapiens; identical to SEQ ID NO: 872
  misc_feature: n=a,t,g or c

SEQ ID NO: 1406 - DNA, 445 bp, Homo sapiens
tttttttgaattgttcagtgcatccaacactttacttactccacacctttctgcaaaatgctcataataaacctcctgtctacattgtgttccaatgaaaactttagtcatattttacatttattattaatataacatgctatgtaaatgtacaggagcctgacaaatgacaatctacttacataatttaaataacacaagtgcttgctgcagtctttattagtacacagctttgttatggcttcttagaaataattttaaaaagtgcatgattcttgtgggctactctgtttaggaaagattacagataacacatttctaagaatgaattagtcagctgtatatgggttcagattagaaaatattaaataaatacagggaaaaatatttttaattagcttaatttatatatgaaaatattttatttaatttgtttttgagacag

SEQ ID NO: 1407 - DNA, 436 bp, Homo sapiens
cagtagaaactgtacttcaaatattgaatttttattcaaaattctttataactttattacaatatagattttgtgttggatagttttgcccactgtaggctaatgtaagtgttctgagcatgtttaaggcaggctaggctaagctatgatgtttggtaggttaggtatattaaatacatttttgacttatgatcatattttcaacttatgatcatattttcaacttatgatcgggtttatcaggatgcaaacccatcacataaatggaggggtgtctataaaacattgttagacctataattttgctgttgattattcgggaggtggtatggcacagtggttaggggcagaggccttggagttggactacatgggttcaaatcccagcttggctgttttctgtgcagttctaatccagttctgccacaacctggtt

SEQ ID NO: 1408 - DNA, 406 bp, Homo sapiens; identical to SEQ ID NO: 276

SEQ ID NO: 1409 - DNA, 349 bp, Homo sapiens
tggttccatcggtgattttaagaatttcatttaggctacagaggttcataggaggactcagagttccaggccctccaaggagactctggcctgtaactgatttaatcccagggcagtaaggtgagcagcatgtaaccccttgtcaaataaggcagtggaataagggttgacagaggccagcactcaggctgtgctgctcaatgacagtgaactcttccaggcacagatgatgagggtctgttgctctcagacttggaacatgagaacagcaactgtctcttgtccattaagaaaaaaaaagccaaatttcttctctgggcaatatccaagcccaaggtgtaagaagaaa

SEQ ID NO: 1410 - DNA, 359 bp, Homo sapiens
ttttttttttttttttaaaaatcagatggggactttattgtgatggtggcaggtccaccagcagatgcaaatgtggggtgctgagagtggcaacacaggccaccccaaaccaacttcactccctcccctgtcctcagccagtacagaagccaaatgtagccccagccctagactccagcccaggcagagtccaagggaggggtgtcagggtcagaagtcacagggagcccagtgactatcaaggtggctgagagcaaggctagggtagggatggggcagagaaagggcagggggtgcagcccaggtggcccaaagcaacacagaggagcaagggctggcattcaagtcagcaggtccct

SEQ ID NO: 1411 - DNA, 432 bp, Homo sapiens; identical to SEQ ID NO: 414

SEQ ID NO: 1412 - DNA, 315 bp, Homo sapiens
gaaaagacgtgcttgtcattcttaataaacaactagagtaagaatacataagagaaacagagtggtatctttatatgatacacaagtgtatgttacaagaattccatcaggcacaggagcctcaggttttaaggcctcaatgttaggccaacaaaaaaaaaaaaggcatggtaaagtttttacttttacatctaaaatgtcacttgtcataaaggagggtgtaatagaaattgtctttaataaatcataattgaagttcccctcatttttcttccattaagatgctaagtttatgtctgatcatgaagaaagaaa

SEQ ID NO: 1413 - DNA, 408 bp, Homo sapiens; identical to SEQ ID NO: 874
  misc_feature: n=a,t,g or c

SEQ ID NO: 1414 - DNA, 454 bp, Homo sapiens; identical to SEQ ID NO: 281
  misc_feature: n=a,t,g or c

SEQ ID NO: 1415 - DNA, 248 bp, Homo sapiens
  misc_feature: n=a,t,g or c
aaacgttaaacatcgtttttattcccagcacctaccattgtgccccccttataatagacagtaatggtatagtgaatgaatgaacaaatgaatgagttgagaaatccagaataatacatcacaagctacagcgaatttntcttgctagtgctcaggacaggtgaaatgaatcataacaggttggtgtctgtgaaaagctgacagagatgtgagaggtcccaccctgaggccaacaaagactctgcagc

SEQ ID NO: 1416 - DNA, 272 bp, Homo sapiens
aatttctctcatctttatttttattaaaaaaaataaaacagtcaccaccaaccacatgacaactcgccaggcaaggccttgcttccctccctcctttgcgtcccatgtgcctagtcagcaaggtcggggaggcaccgatgttagcttcgcccaaagggagtattacagagagaggcttgggaaagggaaggaaacctggacaggcttttcagcactgagaaatcacttaaaactgatttgctttcagtaactggtatgtctgaaatgcaggg

SEQ ID NO: 1417 - DNA, 247 bp, Homo sapiens; identical to SEQ ID NO: 288
  misc_feature: n=a,t,g or c

SEQ ID NO: 1418 - DNA, 268 bp, Homo sapiens
aaaattaaatttctctttattcaattgcctctgagtagtgctgtgatttccaagtgccaggtagttaggtgtacaaatatacataccacagaaacatacagtttttaaaaaaattaagaaactggctgcatctgacgacatcaagaaaaaagataattctgattcaagggcttctccagaagatggggtttcattggcatgacgctcataggatgacctgtcatttttgtactattttttctagaaccatagagggatgacagtaact

SEQ ID NO: 1419 - DNA, 290 bp, Homo sapiens
ccggggtgagacgggtttattgtgcacatttacacagcgtcacagcgtctgggctggcagcggccatgctcctgtggtcgggctgctctacaagggcgttcacttttcttcaccacactatgtacagtcagtgctccaaggtgatgggctacagtgctgcatcagtgagtctgtacacacatttttacataaattacacacgactcatacatgaaaaatagagcctaagggcctgtattttaatgagaaaaaaaaaatttccaacatagttcgggtagctttgaatggtc

SEQ ID NO: 1420 - DNA, 291 bp, Homo sapiens
  misc_feature: n=a,t,g or c
gggatgaatccccaaagtttatttaatctggtaccctcattaattggaagaatgtgaggctcaaaaatgaaatggccacaagagccatgactagaatctcttcgttactcagtccagtgctctatcataccagctactttcactcttctaacccacagtttaccgtatttnctaatacatgctagtatattgcctagtacacaacatcctttcaaatattctttctttattctccaattcacttttcaggagaatagataacctcaatcatattgattctcagcctaatgg

SEQ ID NO: 1421 - DNA, 347 bp, Homo sapiens
  misc_feature: n=a,t,g or c
gctttccagcttttatgaaaattaataacattaatagctcacagacatatacatacacacacattgctatgtacacagtcattaagttattaattaggctctgtaaaaaaaaggtttctacattagtgttccgggctaggcccantcagtccttggcatattcacagtggcagccccagggcttggccccacaggcaggcagaggggaggcaggaggccacagagcagccggccccacagtgagcacagcaagtgtcctgggccacctccttgagtcttcagttcccttcctagcacctgcagtccagctgctcagcaagccggcagacaggtcctgatcccttctg

SEQ ID NO: 1422 - DNA, 365 bp, Homo sapiens; identical to SEQ ID NO: 289
  misc_feature: n=a,t,g or c

SEQ ID NO: 1423 - DNA, 322 bp, Homo sapiens; identical to SEQ ID NO: 878

SEQ ID NO: 1424 - DNA, 273 bp, Homo sapiens
  misc_feature: n=a,t,g or c
acatgaacaacataagtatttatttgaaaaacattttccatttaagtaaaatggcaaattagctagagtagcttcttactgctaattctatttgcactcacagtcacttttattcatcatattcaaagatattgctaccaaaaatgatttcacaaagtatttagaaaaaatatatacagtctctctaatagaaagttaattaaaacaacaaagctaggcaatatcaagctaagaaaggnaaccaattgacatatataaccacaaataaataaa

SEQ ID NO: 1425 - DNA, 287 bp, Homo sapiens
ctcagggataataaatctattttaataacgttacttttgacaacgatttgtacatgtatttaaagataacaactttcaacccccacccttaccccagactcccattacaaattgaggcatgacctgcccttgccaggaagtgagcaaagctgcaacatcaaaactctgcacatcccactctcagaggagggtgactttacactgtgttgggaaaaataactaagcatttaaatttttcattgtacacctgtacattggtttagattgaatggctcaaattaaacaaa

SEQ ID NO: 1426 - DNA, 321 bp, Homo sapiens; identical to SEQ ID NO: 879
  misc_feature: n=a,t,g or c

SEQ ID NO: 1427 - DNA, 193 bp, Homo sapiens
aaacaccacacatacacaaagcattttaaaggagccacatatatctatatagcaactctgactgcttttcaaagttaccagggaaaggaacttattcaggctttctttaaaaaaactccttagttttaatgtatatctttttaagattgatgctgtcatttgaagtaaaataatgtcatatggataatggggg

SEQ ID NO: 1428 - DNA, 397 bp, Homo sapiens; identical to SEQ ID NO: 93
  misc_feature: n=a,t,g or c

SEQ ID NO: 1429 - DNA, 369 bp, Homo sapiens
  misc_feature: n=a,t,g or c
gaagaattttctctttattgagtgctcagtgtggtctgatgtctctgttcttatttctctggaattctttgtgaatactgtggtgatttgtagtgaagaaggaatattgcttcccccattcaggacttgataacaaggtaagcaagccaggccaaggccaggaggacccaggtgatagtggtggagtggagcaggtgccttgcaggaggcccagtgaggaggtgcaaggagctgacagagggcgcactgctgctctantgtggctggggccttggctaagtgtccccctttccacaggctcgctccaganccagggcgnggcttgagagagcagagtggtccaggttagcccttgccttggggtgctgg

SEQ ID NO: 1430 - DNA, 456 bp, Homo sapiens
  misc_feature: n=a,t,g or c
tcaaagaaaggatgcctgtagttagggaaatctgaagagtttttaaatgaaaaacctgctaatctgggttagagataatctgtgactttcaggtaagaagaacattcagagaacatagggcttctaatagaagaaggataaaccagaagataggtaacaaagccaaagaaataacttgacaagaaagctgaactttggccagaatataaaacatgggagttattagtgatatgaggtagaaaggcggtgggtgacagtaaaagaatcatccataccatttccaagttgttggccagatggaaaaatttgtccctaataacaaaccacttcagtagaattctgtaatggacaaagttagaaaaagccaaatatgttgcaattataacagattatgataattatggaaacagaaagcnaagttactagggctaaggtattaaaatgagtagaagaaaa

SEQ ID NO: 1431 - DNA, 471 bp, Homo sapiens; identical to SEQ ID NO: 881

SEQ ID NO: 1432 - DNA, 317 bp, Homo sapiens
aaaaaatatatgcgtatcacaatttattaaactctaacatctaagagcaaaaacaccaggattaagtaagaacatgcatgaactaaaatttacatagatattcaaagtaagttaaatttaccagagtcctgcatctggcctctcccatgccattatcgctattttcgcaatttgttttgttcaggaagcctctgattttaatatttaaagtgtcacctgagaagagtaacctcaattcttcatgttttctcaacaatcttagaggtgttggacatcattaataaaatatactaaattatcagagaacttaagaacgc

SEQ ID NO: 1433 - DNA, 463 bp, Homo sapiens
  misc_feature: n=a,t,g or c
ttttttttttttcaacaaaactgcagtttaatttcagaaaatgttaaaatatatatttatacatcaatttctgacatacacttaatgtgttagtatacacaaaatgatgctttcttttgaaactgtatttangaaatgtacattttaatttaaatactcagtatacactgcacttaatctgcatgttgcatttattaaatacattaaaatctgcaatgtaacaaaacgttttctgcatacgaaattcaaaacaccattttaaatgaacaaaagatggctcacttttttttttttttttttacaactagngtatngtacactagctcagctccaccaaactacctgntcgttcncctttatttgacattggttcacagacnagtacatattacnataagagtgcnggataaaaacctgnggtacgaaagtgggttcccaggnttttagggncctggcaggatca

SEQ ID NO: 1434 - DNA, 466 bp, Homo sapiens; identical to SEQ ID NO: 101
  misc_feature: n=a,t,g or c

SEQ ID NO: 1435 - DNA, 252 bp, Homo sapiens; identical to SEQ ID NO: 882

SEQ ID NO: 1436 - DNA, 323 bp, Homo sapiens; identical to SEQ ID NO: 883
  misc_feature: n=a,t,g or c

SEQ ID NO: 1437 - DNA, 427 bp, Homo sapiens
tttttttttttgagctggagttttgctcttgttgccaggctcctgagcagctgggactacaggcatgcaccaccatgcctggctaactttgtatttccagtagggtttctccatgttggtcaggctgatcccgaactcccgacctcaggtgatccgcctgcctcagcctctgggattataggcgtgcacttgcgcccagcctccagttttcttttctttagagcagcggttttaaatccttttggcttcaagttctctgaaaatttactatgctctccacaacaagagctcccattttccacagacacagtcaatgtcagtcagcttgtattcaggaggacagggcagagggatcccagtggcacttcccatgggaagacagaagagagtgggccccagagatggaaggaccccagtgtcatcacca

SEQ ID NO: 1438 - DNA, 422 bp, Homo sapiens
taacaaaatggcccctaaacaaacaccaacaacttcacttggtcttcaaacaaagaaacagtctttttttccaacataggaggaaaagctacttgttgtggatgtacaggtttccaacatggcacccttctaaagggctttcaaggatcatcctaatagcccattttacctatgtactgaccttggaagctaacccctgagtatgatgcaactccactctaatgtaaattaaaatgccatgatcttaaaaatgccataatattgtcagtataatttaatttccagtttagttccatcttcacatttagcagtgtgtgtctgtggccgtctcctggtgccagcatttcagaatgtactatcactggctgagaaaatctcacggtgagaagagtagtgtgtcataagatctgaacaaaaaagct

SEQ ID NO: 1439 - DNA, 330 bp, Homo sapiens
agatagtaggatttattttaatttttcaatctgaaaaaaaaaaaacccaaaacaaaaaaaaacaaactatcctcatatatatatatacagtgtcaacattttcagagcacttacattaggaaacattgtttctcttcaactgtatgacaatactgtatatgccacaataaaatttacaaaaacaatcgcatcagcagtcataacaaacatcatgattttacatttcaatacacaagaaaaaaaatagacatcttcccggcacttggctcccgcctgacggcaacgtctcctccacactttgagagacctcagcttttaaaacccagcagc

SEQ ID NO: 1440 - DNA, 420 bp, Homo sapiens; identical to SEQ ID NO: 109
  misc_feature: n=a,t,g or c

SEQ ID NO: 1441 - DNA, 411 bp, Homo sapiens
  misc_feature: n=a,t,g or c
atttaatttatttatgtaatacagtgtagaaagctatcatggcataagcaatgattctgtacaatcatcctgcagaaaattaatttttggagaattcttggtaattggagaccagcagaacactccctccccccaccccgtaaaagtgcttatgatgaacagggataattttnttttaatttttttttatcaaagatccaaagatacatggacaaaaaaaatgttcaaattctcaatgcctaatgtgtgcacataaaacaggcacaaagaaatcaatgtgtatcctcttattcctatatcacaaagagagcagaagcagcaatctgtacagtaagatgcagtcatggaaaaagaattttctaagtcatttggaatacttaaaaaaatgttcaaaatggcatagtgatcagg

SEQ ID NO: 1442 - DNA, 780 bp, Homo sapiens
  misc_feature: n=a,t,g or c
tttttttttagctttgacacatttttattaggtgcatgaaaactaaatgtcttattgccaagtatcatttttacattttctcgtcaaatttttataaaagcttaagagcaaaatgcagtaggatcttaaaaaaattctacaaacatagctggataaattctgctgctgagccagaactgttggctggaaggcagcgcaccatgcgatcgttccaaaggctgtcagttttgtctaaagacacaagctgggatcctctaagagttgggcaactaatagcaaaagcccacttcctgtcataggaaggttattttcaaactccaaaccccagcaccacttctgtctctgaaanggagagggagagaaggaggagctgtttacaaacaggatgtctgattacggagttacaccggtggccagattggatcagatatttaatgcttgattagggtggctagtgggcaggttaaggctggcagattctgagtactctccatttaaggacgcctgcaccnggatacaacttgccgacttcataacccagctctgtggctggctagcctacgnctttaacaagggacaagttcgggccaaggctcagttggtggattggaaaataatgtctatangaccccattatacctaaagtttctaagccataaagtctgtgactgtgtgcatggtgtagacatnggctaaacccagaanaggggttagaaaagtcntcctaatccttaatttaaggttattaganttggnggttcccttccaggttttggcctc

SEQ ID NO: 1443 - DNA, 422 bp, Homo sapiens; identical to SEQ ID NO: 110

SEQ ID NO: 1444 - DNA, 572 bp, Homo sapiens; identical to SEQ ID NO: 111

SEQ ID NO: 1445 - DNA, 403 bp, Homo sapiens; identical to SEQ ID NO: 112
  misc_feature: n=a,t,g or c

SEQ ID NO: 1446 - DNA, 374 bp, Homo sapiens
  misc_feature: n=a,t,g or c
ttaagacaaacataacctttattctctctcaaaaacccagagaacagggcctggaaccatattcgttaatttaaccagaatcagaatactttaactttcatagtctcatttaaaattttatagcaatatactgaccattctaaaaataacaaaatacatgttgctctcaactacatagttaaaaaaggtagtaaattctcttacccaaaatagaggaggggtgggctagtgagctgctcaaacatttgtaacaaataaaaatgtatctatatacatataatgatcatgttttcatagcctaaaatcaccattaacaaaatctaataataaaattgtgtcgtgttcaggagttgggaagccaacacattaaattn

SEQ ID NO: 1447 - DNA, 447 bp, Homo sapiens; identical to SEQ ID NO: 114

SEQ ID NO: 1448 - DNA, 302 bp, Homo sapiens
gttttttaaacatagttgctgtaaacgtctatgggaaatacagtctttataataggttctgatagaataattgagtaattcccccccataagtacattttattgactgttactgcataataggcgataaatctgatgcttatttggaaaagaagtaggcattctttagatgagctgtgctttgaagactgttatgaaaaggaataagaagtcagcatagtggcactcctggtttccttttttggcccccgcacagaaaagatggatgtagtaaagaaagttggagtgaaagagaaagttcca

SEQ ID NO: 1449 - DNA, 419 bp, Homo sapiens; identical to SEQ ID NO: 117

SEQ ID NO: 1450 - DNA, 411 bp, Homo sapiens
tttttttttttgagatcgagttttgctctgttgcccagtgcagtggcatgatctcggctcactgcaacctccacctcccaggttcaagcgattctcctgcttcagcctcccaagtagctggaactacgggtgcgtgctaccacacccagctaattttttatgtagagacggggtttcaccgtgttagccaggatggtctcgatctcctgacctcgtgatccgcctgcctcggccttccaaagtgctgggattacaggcgtgacacccgtgcccggcctcaactttttatttattagcttgttggtcttcaacctctgtaagcctcagtttcctcacttatcaatcatctactgctgtatagagacaggtccatctcctagcatgcagggtgaggctaatgtgacatttgaa

SEQ ID NO: 1451 - DNA, 638 bp, Homo sapiens
  misc_feature: n=a,t,g or c
tgttgcatccgtgtgagctccataaatctgctatggaacagaactactggttcttgaatggaatcagttgtgctgtttgctccctcagatgtctgcttcccatagatcctaccagaaatgaagtcagaatcttcctcttttctctctagatgctgcaatcgcttggaatcttgttcaaagattgagctgtgtaaaaaacgagaagcaaacaattcctgcctctcttgctcttcttctttatggtcctctttcttatcatccattttcccttctgaatcagtcctaattttcttctttttcatgtaccaggatggaataggtcttggagcagagtcaaccttttctttatctttgttgtttcgaaaatttgcaaatcgggagtcccaatcaagaaaagaccaattttcttcacgagatgaagagagggatttagctctttcaagcaaagcttagtgtctggtgtgattgtctatccaatgcaaaagagtaaaatttgttccttctaaagaactagagagtctttcatctcgctcacgtagctgtcttctctgtccctcaataaaaaagacnatcgagaaacttcatataatggcagagggctcgggtgagtggganttgtgttcaccatcctcgtcaga

SEQ ID NO: 1452 - DNA, 354 bp, Homo sapiens; identical to SEQ ID NO: 122

SEQ ID NO: 1453 - DNA, 387 bp, Homo sapiens
gactaaaatgaatatattattctaggttaatttttttccattcaaatgtttatactccatctacccagaacaattacagcagaaaaaataggcacctccaaagtcttcccaagaatgatgactttctgaaatgacacactgtacaaactggacaaatgagacgactgactgtgacaggggccggggagctcttcaaggggccgttttcttcaagtctcggatctgtttaatcaagtagttcttctcgtcagcgaactgctcatcatccgtcctttctttttggaagctgctcagaaactcaatgagtttgggctgattttttaacaggatctccacaataggctgtgttttgtgaggactggccacaaacaccttaaaaacatgaaa

SEQ ID NO: 1454 - DNA, 317 bp, Homo sapiens
ggaaggaaggaagggtttatttgatgcagattcttcagcattttgttttcacagactcccttcttttcccctcttctggacccacctttttgccatctcaccgttgatgagcagcttcagcttagagggtaaagacaggcatgatcgcgactggccagcatactggcgtgttctctctgttagcagacttttgccaagggtttggatggaatgggtggctcttcaggtggaaaacaggtcgtgggggtcaggttttgggtgcctgaaactgctcttccttcactccactgtgccatgactggctcccacccgaagct

SEQ ID NO: 1455 - DNA, 330 bp, Homo sapiens; identical to SEQ ID NO: 128

SEQ ID NO: 1456 - DNA, 305 bp, Homo sapiens
ttttttttttgagttttcatattttttatttaagaaaatacttgaattgccttagacaatattaaatatttaaacaacatgagaaagagtgccagaggtcagaacatagtatttagttcactgagttgccctgacagataatgaatggggattgatttaatagtgaccaaatacactggccatatttactaaagtgctgtaaaatggccaagtgaggacaactgcatctaaaatgagatcaaatcctcgagtccattccttttagcagaaatgattaaaaccatcttggcaggaccaagtctttg

SEQ ID NO: 1457 - DNA, 408 bp, Homo sapiens; identical to SEQ ID NO: 132

SEQ ID NO: 1458 - DNA, 501 bp, Homo sapiens
gaaagaaaaaaatatattatcatttattatataacaatgtcaacattaacaccaagacagggacagactccaactacgcactagggaaaaacactcaatgaggcaagactttctagagcccaaaagaaggaatgggggaagagatctggggagtagcgtgaatgtggctggttgatgggtgtggtggtagtggggggtgggactcatctttttgtgtttgtttttttaagttttgagacaaaacaagaaagtcacatttttaaaattgtggtttcaagctactgattagatcagcatccagcgaccttgagtgcagatgtgaacattgggtgaaatgaaaaatcttgtctgtggggttctcttggctactgtctctctccttctctctctttctcctctctctctctctttctctaggaaatgtctgttgtgaagcaggcctcactttagctattgtcgctccactctggcaccatgccactccgtgcacagaggggtact

SEQ ID NO: 1459 - DNA, 358 bp, Homo sapiens
tttatgaatcctgaaaatttattatttgggagaatatccaatattgattctttgttttacagctcataatgatcagaaaatatacatttaaaatgaaagtcaaagaaaaggataattacatataatacatattacagatttatttgtacataagcaaagcagtactaaaagcatatttatgtgctcacaattagtgaacatggcaattttctgtttaaagctgcagcaactcaaatcctcctagggtcaataaagaaaaacatattgagaaatacatttagggctatcaccatgtctggctgtaaatctattttttaatctttcccctccccccatatatatgtatatactttattgc

SEQ ID NO: 1460 - DNA, 267 bp, Homo sapiens
ttttttaaagggaaatcattcatttattaaggatcgcaagacaacatcttaatttctgtagtacgatttaaatgttttacttctttgataaagcagagtacaatagaaaaaaaacaattagtttccagtaatatctatatctctaatcagaattaagtcttccaagacatattacctggaaataaaagcctgttacaataagcaaagcttcaaccagagcggctacttttcgtgccaggaaaaagttcatccctatagggaggaatg

SEQ ID NO: 1461 - DNA, 414 bp, Homo sapiens
gcctttttccacaggttctaatccagcaccattattaagactattcttcttccattgaattactttggtgatgctacttgtgctgaatccataaatctcagatcaaaatagccactttcaataagatccaggtgatacataatctgatcaaacaactcttgccctttggctttttttggcaagtccacactaacatcagtaccatccagaagggacacctgacacgtgatgatggacctggaatctccaggggcaggaatatgtgtggcagcgcattgtgcttctcggagtcgttccttctctgcatgtttacccatagaccgactccctagtgttctacggaagaaactcagcatttttgtcactgagctggggacggcatgtccccggtgatagcgaccagagagatgaaga

SEQ ID NO: 1462 - DNA, 396 bp, Homo sapiens; identical to SEQ ID NO: 149

SEQ ID NO: 1463 - DNA, 412 bp, Homo sapiens; identical to SEQ ID NO: 893

SEQ ID NO: 1464 - DNA, 376 bp, Homo sapiens; identical to SEQ ID NO: 895

SEQ ID NO: 1465 - DNA, 460 bp, Homo sapiens
ttttgacactgaactttatatttaataattacagtaagaattttttggtagattttattcacacacattttaaaaatcatgaacaaagtcattaattctgaactcaagtaacagtcaaaaatattttaatttaaattaaggcactacatacacatttctttaaagcacactgatgttattttatttacacactattttaagaattaacaataaatacacattttccatctcctccttgtccttcatttataactttatatgttaacaaggaagtaaaaccctccaaataaaaggaattaaatgcaataatccataaagcttatcagatatgggcacaagaaggagacacccataaacaatgtaaaaacattttaatcctttaatgttacaagaatttatctataaattcttatgccattcctagtggaataataatataaaacctatacacaaacattga

SEQ ID NO: 1466 - DNA, 452 bp, Homo sapiens
tttttcctgttacgccgtcaatgcagcaggcaatgaggggaatgacacagccctctcattcccggaacgtagtcaatctcggctctgcggatttcacagaacacactttgcctattgccggctccaacaagaagtaactttccaggaagctgccggccccggacgcgccaggatcgctgcctgcgctgcgctggccgccggggattcacccggggaggcggggccgcgggggaaggctcgcggggaatacagcacactttcccctaaatccctcgtccgcgccgagtgcagggctctcagagttcacctagtcccacctctcacccacaacagtttataaatggggaaggtcagacaagttagtagcagagctgggtctagaacccaggagttcgaatgcaatccgaggctcatatcgagactttaagttgtccgattccgaagtttatttg

SEQ ID NO: 1467 - DNA, 283 bp, Homo sapiens
tttacgatttaaaattttaattgttaccaaacaaaaatatccactcaaaatacaattcaacaatgcaacagtcatcttacagcagagaaatgcagagaaaagcaaaactgcaagtgactgtgaataaagggtgaatgtagtctcaaatcctcaaagagttgtgtttatttcatcgacaaatagattattcgtattcaattctgatgtgttttaaagactaagatgctcattttacgattagcgcacatgtgtatattgtcacctgttctccttagaaaaatgc

SEQ ID NO: 1468 - DNA, 181 bp, Homo sapiens
tttttgtggattagattttaatgtgaattttggaagtacacaaaatgttcaaactatagcatgtatatatatcaagttggcagtataaactacttgcaagtaactttagaacacaagtgtttgcccattggtagtgagatggattctaagttgagatattagctagaacattccagttggt

SEQ ID NO: 1469 - DNA, 514 bp, Homo sapiens; identical to SEQ ID NO: 898

SEQ ID NO: 1470 - DNA, 449 bp, Homo sapiens
tgttaaatgtcatagtgtttactttatttaaatcctgaggttaaaaataaagtatttccacatggcatggcagacactataaaataatatgcttagggatacaaaagttttccacccccattgagcaggtggggtgctggtatttgatgtgcttctagataattctttggcagataagaatgaattggggtcccagacccaccatcccgtaaggccacatgaattgaggattaatcaattaaagtgcaattccaaatgttgagccttccaaatgaggcttgggtattgctctgcagccaccagaggcagagtgtctctgcataacatacatcaagcagcctttttctttttttaaatcagagatgcctccccaaatttcaagatgtactttattattttaaaagtgcttaagaggaaagagagaattattaattcagtctctcctgttt

SEQ ID NO: 1471 - DNA, 384 bp, Homo sapiens
tttttttttttttagaaaaaggcatttaattacaaaattttcttttaaataaaaaagcaatggcacgaatcaccacaaaatcatttaagtgatcatatccacaggctgttcttgtaattatatgctaaaaatttatgactgttctcattaacagcattcccccccttcattagagacatcaagagcttctgagaatgtgtagtttttcctaaagtactactaaaagtatcatgaacaccgtttgtgcagcattcatttacatcaccttttatttactatattctaaactcataaaatatttaacatttctctacttcatttcttatttacagtacagaggctcatctcttgtcacaatatggtttgtgcattaaaatccctggg

SEQ ID NO: 1472 - DNA, 158 bp, Homo sapiens
cggttgattttggggggtggagtttcagtgagaataaacgtgtctgcctttgtgtgtgtgtatatatacagagaaatgtacatatgtgtgaaccaaattgtacgagaaagtatctatttttggctaaataaatgagctgctgccactttgactataaa

SEQ ID NO: 1473 - DNA, 281 bp, Homo sapiens
  misc_feature: n=a,t,g or c
gatcgcgccactgcactncagcctgagtgacagagtgagaatccatctcaaaaaaagacaaaaaacaaaattgcttgctaaagaagtggtctcctgaggtcttaagacattcctgacagtntcttgagtgggtggnagagaggttgctgtcattgcnctgtggaatttcacagatgagaccacgcctagccaaaatcacttttcctgtttgcctcagtgacacagttcagggccctcgtggatgttgtattaaataaattnnacctntactntttgccaaa

SEQ ID NO: 1474 - DNA, 315 bp, Homo sapiens
cagtttcaaaacaacctttattctgtttgaagatctaatacaatgcattaaagcaacttaaaacaagacatagctccattgaatctataacttgaacgaaatgtcaaggaggcacactacccccaccccccaccccagttgccttgtgaaggcaaagttacaactgaccgtgacatcctccctctcgtcaaaagaccaactttattttaacaatgtcatataaacagatttttaaaaacattgaacagattgtagctttaaaaatacacaggtataaatgagtttttttttgttttgatttttttaaatacatat

SEQ ID NO: 1475 - DNA, 223 bp, Homo sapiens; identical to SEQ ID NO: 190

SEQ ID NO: 1476 - DNA, 317 bp, Homo sapiens; identical to SEQ ID NO: 200

SEQ ID NO: 1477 - DNA, 175 bp, Homo sapiens
aatacaatacaggtttattgcatcatttagctaattcccaaagaagagaataacacattttaaaccataagcctgtttgaccatgctaaaaccttttttgagctattcaggatcattacaaccccatattcttttgtgtatactgtgcaaatgcaaaaaaaaaaaaaaaaaccaa

SEQ ID NO: 1478 - DNA, 383 bp, Homo sapiens
  misc_feature: n=a,t,g or c
agatgantttaaggttttattgagtggtggagctggctcttggtgagatggatggggagctggaagggggatggagtgggaaaatganctttctccgcagtgtggccgtctagcagctaatctcctctctgaccatccccaaccaaagtcttgtcaatgttcagtcactccttctctnctctttgccactccattcttctgtncttctgctcttctctttgtctctcccttatttgcaggaggtcacagggaagtagagagggggatgaagaaatacatttccatcctgaggtggtctgccatctcacttgaagaggggctacaggaataaggaagtgttctttttctcgttgtaatncaaggggcaatattccgggttaagg

SEQ ID NO: 1479 - DNA, 383 bp, Homo sapiens; identical to SEQ ID NO: 1478
  misc_feature: n=a,t,g or c

SEQ ID NO: 1480 - DNA, 208 bp, Homo sapiens
  misc_feature: n=a,t,g or c
ccatccttctcaaagagacaccagtcagaaatatagatatgcttatgcttgcttggtgtccttgattataaatagtccaaacatcaggaaactaaaatcaaggtgattatataactcctaaagatggaagttgtcaaaatacatcatcacaaaacaaattttaaanggctattttaaatacangattccatcttcactaaactgcccc

SEQ ID NO: 1481 - DNA, 287 bp, Homo sapiens
atgcatgtttaaacatttaatctagaacttgattacaaagtaatttaatgaagaaaataatctgttataattcttatagatgtttattagtttttagatttaaaaaaaaaacagggcttataattaaagcaattgactaatgatctcacagcctcaaggttgtatgcaaacctagattagaaatactttggtctctaaaaataacaaaatggaccataacattttttttcttacaagtttgaagtgggtcaattatgggggaaacacatacattcctaaggggaaat

SEQ ID NO: 1482 - DNA, 574 bp, Homo sapiens
  misc_feature: n=a,t,g or c
ctagagaaaactttattgatggttgaaaacaaaataaaatacacataaggttcccttcccatctctaatatggaaaataaaacacttaatatgaatactcagttttaaactttgctctaagttttattttattttattttgagatggagtcttgctattgcccaagctggagtgcagtggcgagatcttggctcactgcaacctccgcctcccaggttcaagcgattctcctgtctcagcctcccgagtacctgggactacaggcacctgccaccatgcagggctaatttttgtatttttagtagagatggggcttcaccatattggtaaggctggtctcgaacttctggacctcaggtgatcttacctccctcagcctcccaaagtgctgggattacaggcatgagccaccacccccggcaacttttttaatttatattttattttttattgaaataggtgggccaaaacttggtggaaacagaactcatgctgaaggacgacattaatcataataatttaaagagacagatattgcttatgtaacccgtatnaagaatttaaaaccaatcca

SEQ ID NO: 1483 - DNA, 486 bp, Homo sapiens
  misc_feature: n=a,t,g or c
accctgagatagaatagatttattagcaagaggtaatcaggaaacatatatttttacaaaaatggaaatttttttccaaacaagctgtaagttgaaatattttaggacttgaaatagaattctcataccactaggtattgcttacagcaaaagttgtctgtctgttgtagtggagcatgcctgccacttcggagttaacctgtgttttctatactgtacagtgtaaaaaatacatggtaatattcacagaataagcactacattactatattcctgctagaaggcatttagacaggactacagtatatgccataaaaacacttggttattggattttccctaattcctacagtgtgggtactaaattatccaccaaggtatacnggacttaagagccatcctcaatggtaaggcctggtaagtgacccgttangcagccttaaaganggaaaaagtgacatttttggggttccccgactttcagtg

SEQ ID NO: 1484 - DNA, 282 bp, Homo sapiens
  misc_feature: n=a,t,g or c
ttcggtgtttgtgtctttatttggagaccaggagacagattacagcttaatgagaggaacaacgactaagtgatctgatgggaagggtgagtttcctggcccttaggaagcaacagatgtgatttctaatcaacaaaaactagtaagtctggaacttttcagacaggaagctgagaggctaccaaaactaaaagtgaaagtgtctgccatcaatgtgtaagtctaaattacnaataaatacattaataaagccccnaacagggggtacaaaaatttgtaatg

SEQ ID NO: 1485 - DNA, 395 bp, Homo sapiens
  misc_feature: n=a,t,g or c
tcaaatgttaatattttcactttattattacatctaccaagcttagtggaaggacagggctaggggaaatagaggttaaacctcaataagaaatagtattttaagccaggtgtggtggcacatgcctgtaatcccaggtacttaggaggctgaggcaggaggatctcttgagctctggagtttgagaccagcctgggcaacatagtgagaccttgtctcaaaaaaagaaaagnaaagaaaagaaatattaatagtattttagttgggcagtgaaaatgggagaatatcaatagacatttgaaaaagagggaagagcttcagcaaaggccaggggagagaaaagccagtggtgaatattaggggctggcatacaactctaattgtgggagggaaga

SEQ ID NO: 1486 - DNA, 472 bp, Homo sapiens
  misc_feature: n=a,t,g or c
tttttttttttttttttttcagttgaaacatacaactttattgatgatacacaaatgaagtctttggtggataaattcaagtcaaaacaaataatagaacagtaggccattcataatggacaggtttactgtcaattcagaagaaccagtaaaaatatttctatccaagcagcacgattaaagtcacaaatatgttttcagtacaagaggtctatttatttggtattcataaaatggttcagcttaaagctggtgactgtcacagataacatcactctggatgatacattattcaacactggcagctgaaaggatccctttactatatgagcaagtggaaaagcagtaactttcaattttcaacgcttccacactgcaaaatcatgaaatttcttcaagtcttttgacggtacataaccaatcagaatttggttcactagttttataactttcactttcactaagagggcnt

SEQ ID NO: 1487 - DNA, 337 bp, Homo sapiens
ataattcatgacaggtttaatcaggtaattccaggagggaaaaaaaccattaaaacaaattcttatgataatcatctgctatgtccaattacacgggtatgaagtaacagaaatggttacaaacttattatgtattatttacattatatactcaaaactatcaagctagttaactatatctgaggagacacattatgacatgagttaaacagtttttcattgttcattagaaagaatgcagtcaagcttttaatggaaataatatacaagtgaggcacttttgaggtcagaaatagaaagcaaacgacactacacactggaaatgttcacaaaaatc

SEQ ID NO: 1488 - DNA, 510 bp, Homo sapiens; identical to SEQ ID NO: 901
  misc_feature: n=a,t,g or c

SEQ ID NO: 1489 - DNA, 503 bp, Homo sapiens
  misc_feature: n=a,t,g or c
tttttgcctcatcaaaatttattaagttgtacatatacagtatattatcagaacaacaccaaagtggctacacttgacagattctcctaaagtggacataattttcctagagattattattccccttgataaaagttgtaatgattgtgaaagctttgaaagacaagcttgaagggccacagcattgactatcagggcaaggagctatagatgccatgcacgcagggcccagaaggcagcagagccgcaggaggctgtggcagccccgtttctgctgtgagcaaacagtgctatgaggagaccaacacaaagaggaaggtgcttcctctccaggggtagggtctttgggttcacattcagaaacacaagacaccacacccaagagaagaaaggaaaacaaantccctacagggtctgggctncctccaagagacggggccagtgtgccaaaagagggcacgagttgagatgtggaagtttctggtgaggnacccattccttca

SEQ ID NO: 1490 - DNA, 347 bp, Homo sapiens
  misc_feature: n=a,t,g or c
ttttttgttgacacaaaatctttttattccccantttgccatcttttccacaaacctctcanggtacaaatcnggangaangtgcatataaaccctgccttatttaaccaggcccaccgcctccgggacagcccctggggaggccccatcccgctaagtatgaagggaaggccacaccaaagtgctgagtgagccacccagacagcaggtgntntgggagggaggggcaacaaggggtaggggaaggnttcctggaggagggagaggctggccctgagagacagggggcggtcctgaaaaggagagagaaggcacanttttccgggaaccaggncccagcaccttag

SEQ ID NO: 1491 - DNA, 268 bp, Homo sapiens; identical to SEQ ID NO: 431
  misc_feature: n=a,t,g or c

SEQ ID NO: 1492 - DNA, 428 bp, Homo sapiens
  misc_feature: n=a,t,g or c
ttttttttttntacaaggagctttccacttgcttcagcatgcttaatcctcacatcaaccctgcttaggggacacaagctcagacagaggaagtgacttatccagagtcacacaggcagaaacccaggactgaagccacagcctttcaccacatccagctgtctttccatgaggggtaggggcagatcccccgagctggagcctccagggcagccctcgctcagggcagcactgtggtgacgctggtgagcaccacatgctcagagattttgggagatggagcatcggctctgcaagggacaaggacttgtgggctgggcanaggagcgggggactagggggcctttcagaggagccgcagggacccgggncagggcaggcaggcagggagaaggcagcctttaaactgcttccccggattttttccc

SEQ ID NO: 1493 - DNA, 254 bp, Homo sapiens
  misc_feature: n=a,t,g or c
ttttttttttttttttttttttttttttttttattgccaaganccaaagaaaaaattttatttacaatagagaattttatttgaaacatgcatttcttgtttttttaaaaacaaatcagcaaatgcagatcaagtttacactccttaaggcaagagtccctatgcacgctgtacatgttcatattaaatccaaaagctgctcacccggggaacttgtgtacaaagggcaaggccaaggtcagcaatgtgtcttt

SEQ ID NO: 1494 - DNA, 380 bp, Homo sapiens
  misc_feature: n=a,t,g or c
catacttaccagcngttttttattttaatatttttcccngttatatgtaatatacataacttcaaagcacatccgtacaaacctcctacaagctgcaccttcataatgagaaaccataagcatacaatgtctacttcccttcctgtggcttcgttttctgttcttgctttctttnctttttctcatttcaaaggagagtcatctgcagtggccctcagaaggaccaggncacagagggtgaagggtgtggggtnggggaagggggaagggggaggagggagccgagacagaaaatgacagcaagacattgagagttgagggtgaggggaggcgggagagaggaaggtaggttttgcagcccantttcaagatccagaaag

SEQ ID NO: 1495 - DNA, 294 bp, Homo sapiens; identical to SEQ ID NO: 253
  misc_feature: n=a,t,g or c

SEQ ID NO: 1496 - DNA, 179 bp, Homo sapiens
  misc_feature: n=a,t,g or c
acggggagagtgaggaggaaagaggaaaggaaggccagggtgggaggaaggancagctaaanctgagggaagaagaaggaaaggagagggactattncatagcagatgcaaatgaagggacttggggctagtcaggaagaaagggaaagggaaggaaggcaagagagaggggtgaaggg

SEQ ID NO: 1497 - DNA, 534 bp, Homo sapiens
  misc_feature: n=a,t,g or c
aatgtagtcataggggactgaggagcaagggtggccttgaagaggcaaanggaatgtccatttgctgagtttcccttccttatgtctccagtctggtgccaggtagtggagtaaaaaaggagacagtttatttttttattctatgtgcacacttacagtatacatatatatttatatcacaatttacgaaaccaaaaagttgagtttccaatggaacccttgttttttaataatcgactttttaaatgtgatcaggactataatattgtacagttattatagggcttttggggaaggggaggatagcgagaagatgctctggggggttttgtttttgcttttccttcagggttttatttttgactgttttgttttcttgttggccatttctgtattgctgggcatctgtgctaagcctttacagtgggcaaaaataatgacatgtaggcaaaggattttcaaaccaaaatatttttnccccttttggtaaaaanaactccgtgcccgaattcttgggcctcgagggccaaattc

SEQ ID NO: 1498 - DNA, 351 bp, Homo sapiens
tttttttagatgagaatttaagcttttattaataaatcatgattttctattgaatacataataaagtacaattaacaataacataacattacaacattaaaaattaaaactttcagaatcaccttgatcaatatataaagctttagttccttatttcaacagtgttcttctcatatgcaaaacagcttcccaaaataagagattcgtgaatgaaattttataaagcttcctgtgtaccaaagagattgactccacatcaactgtcccctactgaaaatccaaaccatacaggcttgaaggaccagaactgagccacattctattaaagttatcaaagataaaatcttaaag

SEQ ID NO: 1499 - DNA, 341 bp, Homo sapiens; identical to SEQ ID NO: 274

SEQ ID NO: 1500 - DNA, 380 bp, Homo sapiens
  misc_feature: n=a,t,g or c
atgataaagttgatttaatgaatgcaactgactacataaaccaatatagccgtatgcatcagaatctggagcaagctcttacagatgactggagacgcacccagtgtggtgctgcctgagaccaaatgccatcccacgacaagggcctcctgcttcatgagaacacttaccgtcattcgaatctctttgagattaatgtgataatagacactatacattgcatatgcactgggcctcagcagatccttccaacttttcaaagtgaaaaaggacaaacgtaagtgangtttttaaagaggtggcgctcatccgatttttcccgctgtcctgtgtgcaggttctgctgaacacgcacctcccaatcagtatgttctgagagg

SEQ ID NO: 1501 - DNA, 212 bp, Homo sapiens; identical to SEQ ID NO: 278
  misc_feature: n=a,t,g or c

SEQ ID NO: 1502 - DNA, 189 bp, Homo sapiens; identical to SEQ ID NO: 279

SEQ ID NO: 1503 - DNA, 292 bp, Homo sapiens
tgaaaataatgatgctttatttgattgacatcacatcatcataaatggcatctaatttcagaaaacaaagttcaagtccgcaaaaaatgcatgtacaaatctaaggagataggtctacagaaatagacacgtggctctgtggtctgtaaggtcgcagtcaggaacctcacatcctagggtctgtctgggttcaatgttccagtggcgtgagacaaccaaggaaacagacaccccaaagagccgatgttatttttgaatatatatatatgtatatacatgtacatatgtaaat

SEQ ID NO: 1504 - DNA, 364 bp, Homo sapiens
  misc_feature: n=a,t,g or c
gttttaaaacatttctttattagtatatagacagtaaagcatgaaatagatacaaacattacttataaaaatgttttgaaagaacatttgaaaaatagatgaatgtcttctagccagttaatagcagagaaagaatttagttttggtagctcataagtcagtaaccgtatgccatgtctccagaagtaaaatccgtctgttttccagaaaaatgtgatgtagngaattntcattttatgtgttattttgcactcattaatgtaaattttagatttaaaaaaatcaagtttatttgctttctaagaaaatggnctccttncccattcgccagtagnttaatatatgttctacggtgtgggtgtgt

SEQ ID NO: 1505 - DNA, 406 bp, Homo sapiens; identical to SEQ ID NO: 105

SEQ ID NO: 1506 - DNA, 436 bp, Homo sapiens
  misc_feature: n=a,t,g or c
ctgattcaatgctgtatgttttattggagtttaacatgcctacatagtaaatacttggtaaatgtgctgaatgaccaaatgattcccaagatgagctagtcagctgaaagtccaaacatggggacttgggctggtaagcacctaggctttgaatcaaacagctacatctgaaagttttatgttagaataataacgccatgtattacatttctgtgcaataagtgaacccatctctagctcctctccccaccataatcacagcagtcagataaaaagttgaggagtttattagggaaatatgagaggcatagacactccaagtgacagaaagaaaagtctgaaaatgtcccttcaagccaagtgggggcctggcnttgacctctccaaatccacaagaaactggtgggttagcaacaacattctctggcggcacatt

SEQ ID NO: 1507 - DNA, 412 bp, Homo sapiens
gaagattaaacttcctcacagattttgataatgactttggaaatgatgactgaaatatttccctctgctttcttcctacctttgggcaacgtcccggagtgtaaatctagctgatattgcaaggttttgctttatttgatgaaccagcctatattaatgacataacttccaaggtacacagaatctaatactaacggtgcaataatttattggtataatttctacctccaaaggtaagtaacacaaatgtttcaggattacagtatatattatcaaactagtgtctttgcattaaaaacaaattatagctcagagatagagcttgctgtgatgtttagtttctgaaatgcattaaatttatccctcagtcttagaagaccgtgtgtctcaaattgggcatgtcctgcacttt

SEQ ID NO: 1508 - DNA, 515 bp, Homo sapiens
  misc_feature: n=a,t,g or c
gctaataaaacagttaagacaattgtccattttatttgttaaattgctaaaaagtcatcaggggaaaacattaacaaaaaatgaaattgacagatttaaatatcaatgaaatccatgtttcattcctacactgttatgtgcccaaaatgactatctcagggtaagccacctggcatccctgagttgtatgggaaacatcactcacagcaccagcttcgccagggcacatggggtgtgcactgacatgaaccctggttggngggaggggagcagagcaagtagagtgtacaatggagccaacacctaaagtttgctctcatttgacaatgaacacggtgagagggagccacttactggtaaccatgcagaacatgccttctgcagttcatggagaggctacatgggacgcaggcctggaaattcagcttcctcaccaccaggcgtggttagatcctcccactgacttgtgcgctggtaagagancatggataatgcaagtggagcatatcacatgc

SEQ ID NO: 1509 - DNA, 382 bp, Homo sapiens
tttttttgggtttaaaaatagctttatttagcataccaaaaacacagaaacataagaaagaccctacctagtataaacataaaaatagttaaataccataatttaatgtaaaccaagcatcttaaaatgagaaatattataataaaatacatactatttacacagaaccaagttaaagctacctccacagttattggatcacatcatcaatcttgaagtcatcattaaaaatgaagcaaacacaacatatctatctgtactggtcaataggaaaagaagaaatcattacatttactttaaggaagtataattttttgtgacatttagagcaaggaggcagaaagtgccaattctaggattccagacacaactactgcacatg

SEQ ID NO: 1510 - DNA, 188 bp, Homo sapiens
gcaataaataaaacttttattcaaacaagtaactgcagtacagggcacaattcagattttttaaaaaaaaggaaaggaaacaggaaaaaaatatgttcagcactttacatcttcatacaagtgttgctgttttgtgtctacattcatccattgagcatggaatcccctggatttgaaatctttagcgg

SEQ ID NO: 1511 - DNA, 294 bp, Homo sapiens
atttgtttgggagattcccagctagtttcagacttggtctgtgaaggaggcacactattttgcttggtatttgacttggatttatctgtctcttgtagtattggcggcacttgggaagagctcttgtcagaatcactttttgataagattacagatggctcggtagaagtagcaggtggaagagtcttgataggctggctatttttgacgagtacttcggctggatcactagtgcttatggtcttcaaggaaaaagctttttcctgttttggacgggttttagaggtattcact

SEQ ID NO: 1512 - DNA, 299 bp, Homo sapiens
gttttagttcagtttattttttaatatgtcctgagttctttctgttcataaaattatgatcttatgacagctgtaacttttaattaataatattaacaaatcattattgatataggcttttcaatttgctcaagattaggaattgtaagtggaatgaagcagcacttccagttgacaaatggatccaaaggtaatccaatgtcttttaaattaagcttgtgacaattaaaccaatacactgtagcaatgagaaaactattgacaaagtataaccagggaatattcatctcaatatatgc

SEQ ID NO: 1513 - DNA, 239 bp, Homo sapiens; identical to SEQ ID NO: 913
  misc_feature: n=a,t,g or c

SEQ ID NO: 1514 - DNA, 347 bp, Homo sapiens
  misc_feature: n=a,t,g or c
ctgttgtttgttcacctttatttgtgaagtgctatgcccttggtttttccacttagttattaacatgaattagcaagtcaaaaaacatttactaacccacaaatacaaaacatttactagggtttccagtacttatttgaatgaattattagtttaggaggttaaagatggtaggaaaagtgtgtaatctgcgtgtcttctgtataccnaataataaaatatgtngtgaatctggttttaggtctagcacactgttttttttttaaagcagaaatagggggtttatttgatactagaactaaagaaataaggnagtttgatgccaaaacannttgttaattcttttt

SEQ ID NO: 1515 - DNA, 260 bp, Homo sapiens
  misc_feature: n=a,t,g or c
ttttttatgattgtaaaaattttattctcaataacaattccactaaaattatacaaagtacattcaatacttaagaatggcaaaggtggggagaggaggagaggaagccagtttggcctggaagcatcaacagttgactccaacaaaggaagcccagctgggctggnaggaagttgggggtggaggtccggttgtaaaaaataaaaaaggggatcggtaaaaaaaggccacccacaaggaagcagagtgagcgtgcatgt

SEQ ID NO: 1516 - DNA, 222 bp, Homo sapiens
ctgtgagagattttattttatcacctccaaaatgatgtttgcactgcttttgccagcctggtgaaagacagcccgcccacaagcagaactgaggctcctcggtgtctctatgtattaatgttgcggacaccacataggaagagagagttgtgatgggacccacaggagttgcaattaagcacgttgtcagggctacacgctctgccctttctctgctgggag

SEQ ID NO: 1517 - DNA, 614 bp, Homo sapiens
taaaatgtgaaaggagttctttttaatacccagggtaatacaatatccaagatataacattaagtgataaaaaacaaagtgtatgacagtatagatgacatcctacttatattttttgaagcccgcagattttatatgtatgtttgtgctttacatgcctagagtatctctggcagtgtgtgtaagaaatggatcaaaacagttgcctccagggagaggtaatgggtgccggagaagagagggaggcttaggttttccactagatacctatttgcgctttttaaattttgcaccatgtatgtattaagcattaaaaataactgagtttaaattaacagaaaagaaaagaaaacccagtgagcctatgaagtgttgattctcattttggtttcttttttcttttttttaaagatgaagattaagtttgttttatttattcttgattcctcttttgcctttcaaagtcatggtcatatattaagtaggagattccaggttctaaagtaaaatatcgaactgagatgacagcattagaaaaccaggcccaggacctgggattctgggctgagacaaagaactcaatcccaaaacacaattttctgataaattagaac

SEQ ID NO: 1518 - DNA, 400 bp, Homo sapiens; identical to SEQ ID NO: 447

SEQ ID NO: 1519 - DNA, 399 bp, Homo sapiens; identical to SEQ ID NO: 143

SEQ ID NO: 1520 - DNA, 245 bp, Homo sapiens; identical to SEQ ID NO: 145

SEQ ID NO: 1521 - DNA, 361 bp, Homo sapiens; identical to SEQ ID NO: 146

SEQ ID NO: 1522 - DNA, 394 bp, Homo sapiens
gcttctggaagctttgttctttaatgagccatggggtgatttgttcatcaagctgcttttgtgtagccatacagtgcatattttgagtgacacaaactgcactttatacagatggtatcttgttacccctcaaccccccagcaaagaaaaaaaaacaaaaaggaaattacaaagtgcctattgattgcatccggaatgtaatcagttccgtgggtgagataaatcattcttcttatagaattattctattaaacagtaaaatgttatatttcacaggatatggtccttttataatacagtttttaaaaaaaatttacactcagcatacttataaattacttaaaatccattaaaataatataatacgaatctgtagtccacacctttcccatag

SEQ ID NO: 1523 - DNA, 327 bp, Homo sapiens
ataggtatatatatatattttttgccttggaagggagaaactcatatcattttttgcaatcataaaaataagcaaaataaaataaaaacatttcatgctcattaaacaaattttagccaatagagaatagtggaaaaccaaacagccaaaatcttatcaataaaaccacctctgtttagtattttgagagaattattattatatttttggagatggggtttcactatgttgcttaggctggacttcaactcctgggctcaagcgatcctcttgcatcagcctcctgagtggctgggggtataagtgtgcatcattgcacctgccttt

SEQ ID NO: 1524 - DNA, 318 bp, Homo sapiens; identical to SEQ ID NO: 152

SEQ ID NO: 1525 - DNA, 294 bp, Homo sapiens
tttataaagatttaatttatttaaatcacataagattattcaaagccataggcatgattaagtctctatagaatcaagaagattttctgtgtggagaatatctcgtggagatttgaaatgtgtcgcctctcctgagcagccaggattaactctgcttaggacgtttcagataagggtcaggctggcgtccttctttctgcctccatgggttgccaccttttgctatgtcaggggggtcgcttgcttaagacgttgcaaggagcaccccaaatgccaggcttcccaccatagctg

SEQ ID NO: 1526 - DNA, 449 bp, Homo sapiens
ttttttttttttttttttttaccaccaaatggaaaagtcatttaattcaaaaatcatacgtccactcatttcatagggattgtcacataaaccaaccacatgtaagaaagccaagtttcagaggcctctgaacagaaattttgttttctttatagatatatttggtgacacaaaagcattttttaaaagcctgaacatggcaacagggctactaacagggacaaaggtctattctagtcacagattactttctaattacagcattggattctatgcacgagtcaatagtcaatactgaagtttagaacagtgcgttattttaaaagaaaacattaaagtgccatttaataagtactttattgatattatatcacacagcactttacagtatactcaaagatagcctaaattatgaattaaacatgcaaatattttcttttccaaaatgg

SEQ ID NO: 1527 - DNA, 416 bp, Homo sapiens
agtatgtacattcctctttatttaatacaacaacaaacacgtaacatatacaaaaagaaaaaacactcattaaaaggccctgtcacaaaggatagacaggaaacatctacactgaatcaaataaggctcttgcttcaaaaacaggggtttgctagctacacctggaatatgagcaaggctgttgcaaaaaaattaaaaaaaaaaaaaaaacacaaaaatccctgcactgaaggagtatattcatgggggtaatttactaaattcacaggtccatatttaggaatgtttatgccctctcacatatccaaaattcatcagggttttatgaaatgtgtgatttttttttggttaaaaaaatttacctgcccttcttttttcttaggaaggagtgataagagctttctaaaaactagaga

SEQ ID NO: 1528 - DNA, 208 bp, Homo sapiens
tttttttttttttttacaagacagagaaatctactttaatattcacatgtaaaagttacacatcacaagagattggacagtagcttagcgtaacatagctatagtgaaaatcatttttataaaaaaataatctagatgcggtcatcagaatttttggtctgcttaagttaatgtttgaagatcgacttttatccctgcttgaaggatt

SEQ ID NO: 1529 - DNA, 434 bp, Homo sapiens
gaataaaagagaaactttattttaattcagcatcttagttttaatgtaattataaaagtcaccaaaaattgacagaacactagaaaacaagtaattgctaaatcaaaatagaatatcgtatacttttaatctttcattttttttctttcaggtttttcagttgccttctttcctagatcacgtatttctatcgttgttccttttttattgttcctgtgaccactggagcactagtaataaatccttaactcaaataggttatatttaatttcagcacccaagctccaaatgcatcagctaaactgggttatagcatggagaatacctcagacgaccacagattttatttttgttaagattctatcaagactgaggcaaattataataaaagttctcatatcatagaaaacaaattacgtggaaaaggataaaca

SEQ ID NO: 1530 - DNA, 403 bp, Homo sapiens
tgctcatttactgtttttaatatgtagtcaaatatgacagcagtcttacacaaatagctccctcctcccccttctaaaatcccaaatttgttgactcctactgtaagtgaaaaacatggtttgcttctgaaaatagcaatcaacagcaaaaacacaggtaacatttggtccccaccagcttccacacctttaaagataaattgtgtcactgaggcagtcaatacactaaatttcttatcaaactattactaggggaaaaaaatcagatttcccacacactgtaagcagaaccgaaagagctgcagagaaacttggtttaagaagctgtgtgaagaaaacattaatgacttattgcaattgtaataatccccaggtaaaagatggatgtcaaattaatggactg

SEQ ID NO: 1531 - DNA, 383 bp, Homo sapiens
tttttttttttttctgtggtagtctttattattattttttagctattgatacatagcatggcagcaagattacatcagtaatgtaatataatacagcttttttcattgaagctttgtaccttactatactctaggctatttggagtgttcccccacttgcactaaagtacaactatgatgtctctactgcctctcccagtgaaatataaaaatattgcactacattacagatatagtttacaaatgtcattagcagcattactgagctttctataattgtggtctacagagttaaatacttttaaaacatgagtagattcttataaaaccaaagttttgcattatttcaacagctctttcaaatgcatcagtttcagcaacat

SEQ ID NO: 1532 - DNA, 342 bp, Homo sapiens
ttttaaaatgtacaattcagtgatttttataatattcacagagttgtgcaaccatcaccacaatcaatttggtgttttatttacttatttaaaatacagtagagatgaggtctcattgtattgtccaggttggtctcgaactcctggactcatgtgatcctcccaccttggtatttagttattttttagagatgtgatctcccactgtcacccaggctggagtgtagtggcccaatcatagctcattataaccttgaattcctgggctcaagtgatccttctgcctcagcacactaagtagctaggactacaggtgcacaccaccaaacccagctaattttg

SEQ ID NO: 1533 - DNA, 391 bp, Homo sapiens; identical to SEQ ID NO: 918

SEQ ID NO: 1534 - DNA, 495 bp, Homo sapiens; identical to SEQ ID NO: 166

SEQ ID NO: 1535 - DNA, 418 bp, Homo sapiens
ttgagacagagttttgctcttgttgcccaggctggagtctgtctcaaataaaataaaataaaataaaataaaataaaataataaaaaattgtcagccaggcacggtagctgcaactggttatctttatgtgttaatagctgaagcccaaactgtgggatgaaggctattggctgtctggagccctgaacaggtatgagtggaaataattcttaacagcatcaatgagcaaaatctataacctatgtaaagctgctgtctggttaccaagcacatctttccgctcaagaaccaacttcagggaaatggcacaaattacacaggaaaatcttctctctctggtgaagaaacagagaccgcccttgtagttaagtgctgaccgcagaactgcccactactggttatggtaaaggagctgtc

SEQ ID NO: 1536 - DNA, 408 bp, Homo sapiens
ttttgtggaaagacaccttgctttattactgttattattagttccatagtataattcatatatcacaaaaatcaccatttttaagcatatatttcagtgtcttttaccatattccaaaagttctgcaaccatcaccactacctaattccagaatattttcataatgccaaaaagcatgcctgtacctatgggcagtcactctccaattccccacttcttgcagtctctgacaaccactaatctaccttctctatatatagatgtacttgttctgggcacttaattcaacaaatggtcctgggacaactaaatatccacatgtaaaagaatcaagttagactccctccttgcacataaaaattaactcaaaatggatcagagacctaaaggtaggtggtaaaattataa

SEQ ID NO: 1537 - DNA, 372 bp, Homo sapiens
tttttttttttttttttgttttcccaaagaatcctgtattttaatgaatagctgaataaatagacattaattatgaaattcacattaagatagaagaaaatccaaacattctgattgctttatctcttaaatttgataactactacaaaacatactatttatgttagggtaaaaataagctgactcacaggagtgtaactgggaagtgctggcagatatatacagtaacatggaggagccatacaataaaagcgtttatatgtacatcattttttttctttttgtatggagaaatgctgccttataaaatcggaaaacacacagtagactacatgcaacaaggaccaatacaatgtgcacagcagaagaatc

SEQ ID NO: 1538 - DNA, 369 bp, Homo sapiens; identical to SEQ ID NO: 922

SEQ ID NO: 1539 - DNA, 444 bp, Homo sapiens; identical to SEQ ID NO: 181

SEQ ID NO: 1540 - DNA, 440 bp, Homo sapiens; identical to SEQ ID NO: 182
  misc_feature: n=a,t,g or c

SEQ ID NO: 1541 - DNA, 348 bp, Homo sapiens
ggcaacatttctytyattcaaattttattggaagtttacaaatgtattacagacatcagtaaaacatcatatccatttyacagggcacggvtctcaagcaaagtgttcagaacagtctctsgcagasccacaccaaaggcctgtybgcagaccttcttaacaaatagcttgacactcaacacagaacacagactctggcctgcctcaccttcccaggcccttygaggttttgtytatgcacttgvamtgaaagcaggagatggacaaagcaatcctgtggaggaaagaatgagcttaggagaggaaaacctgccsaagtcctaattybgctaaaaaaaattaattaaa

SEQ ID NO: 1542 - DNA, 231 bp, Homo sapiens
  misc_feature: n=a,t,g or c
taattttccacaaagagctccagaaggcaaatagtttatcacttccccactctgaaatagcacgcaagacagatgatgcaggggaatgggtgtccactcttncttgtnctcagagctcctgcagcaggcctgantgacccgcaagcggggcccatgcagcgtgtcctctgcaaagtgcaggtnttcagtccacacacagcaccaccagcactgctgatgtcacggttgtct

SEQ ID NO: 1543 - DNA, 318 bp, Homo sapiens; identical to SEQ ID NO: 197
  misc_feature: n=a,t,g or c

SEQ ID NO: 1544 - DNA, 263 bp, Homo sapiens
  misc_feature: n=a,t,g or c
ggcagaaaatagactttattccaagacagatttgtaaaagaatgtttttaaagggaaaggcaagtcacgctactaaatcaaacattgttcacaatttctggntcttcctcctccgcctggcactacagctgagccttggcggatatgcctcggggcctcggcgcagaggaacttagcctcgattctnttcctgaggggcttcttaacttttccaagccaggcagtnagcgtggtgggaggcttgggctggtgcctcggcagct

SEQ ID NO: 1545 - DNA, 406 bp, Homo sapiens
  misc_feature: n=a,t,g or c
tttttttttttttcacgtggaatggtgttttcattggtgttagttgggggaagaggttaatggttacagagccagggcctgggcaatggggtcaggntctccctgccctcaggngggcagtcggggctcctgctgtggtccgaagcccctcccccattgtgtcctctcaggcagttgatagaataaattccatttaaaatatatgcatttctctctgcttagaaaataacatttacaattgaaaagttaggacttntgggatctgttaaccccactgcctcccacccctgctagccctgcctcagtgagggaaggcgggggcaggagctgcctggggcaccaccgctgtgtatttacatgtcctntgtaacacctnacggagaggggggcccggccagnacacaag

SEQ ID NO: 1546 - DNA, 319 bp, Homo sapiens
  misc_feature: n=a,t,g or c
tcttacaatctcattaagacagtagtagctttattattatnctatttccaccaatgaggaaatgagagtttacagaacttaactcatttgtcatcatcactcgttcacaggtgatgaagcaggactagaatccatgtctatctagatccaaggccactttttttttttaaatagagatggggtctcgccctgtagcccagggctggttctcgaactcctagggctcaagtgatcctccacctcagncctctcaaaagtgagagggcatgagccaccacacccggccagggccacactcttcttaaccactacattctag

SEQ ID NO: 1547 - DNA, 290 bp, Homo sapiens
  misc_feature: n=a,t,g or c
ataagangaaatttaattcaataatttgattcatcactactggaaaactacatctttctnccctgtcagtactggatggcaatgacgtgaaagcagctttccngggtctcaacttcccttcaatgggaagcattatggaatttcagcagtgaacatcatctgggttcctattcaaaccccagctccaaggaaaatgtgaggagagaatctaaggatataagtnctgttcaagggcaagaaggtttccaatctcaaatatttnatggccaacaacttatggttataccngc

SEQ ID NO: 1548 - DNA, 443 bp, Homo sapiens; identical to SEQ ID NO: 924
  misc_feature: n=a,t,g or c

SEQ ID NO: 1549 - DNA, 383 bp, Homo sapiens; identical to SEQ ID NO: 466
  misc_feature: n=a,t,g or c

SEQ ID NO: 1550 - DNA, 363 bp, Homo sapiens; identical to SEQ ID NO: 209

SEQ ID NO: 1551 - DNA, 189 bp, Homo sapiens
  misc_feature: n=a,t,g or c
taaaggcacagctttcccagtgtttgtgttccttgcttgcgccctgttttaatgttgtagttacaggtgtccagcagggaggaatgcagcccctgtgggcattgggggagctgctgggaatccaagttcaaggagcagctgttttctgttttctgttgccccacagcgccanctctgggccccttgggg

SEQ ID NO: 1552 - DNA, 413 bp, Homo sapiens; identical to SEQ ID NO: 229

SEQ ID NO: 1553 - DNA, 454 bp, Homo sapiens
  misc_feature: n=a,t,g or c
aacttaaaaagcagctagtttttatttcctaggttcgttccaccagtcataaaccagatgaaatctatggcatgattgaaagactatctcctggcactcgcaagattgagttatttggacgaccacacaatgtgcaacccaactggtaaggtgaccagagaacaggctagtcctcaaggggctattatttatgattaaggacagaacttagtagagcttcacattgttttacactagtccataaatgagcttcacaggattcataagccacttaagcttgtatttaaactgttttatgagattctacaaatattcattagaaactcaacaggttctaggacccaaaagcactgctccctagggtttctactctctttcacaacccaagggatcttcctcagccattctgtgatgtattgnatctggcccctgggtgggttacgaagntatctaa

SEQ ID NO: 1554 - DNA, 163 bp, Homo sapiens; identical to SEQ ID NO: 233
  misc_feature: n=a,t,g or c

SEQ ID NO: 1555 - DNA, 231 bp, Homo sapiens; identical to SEQ ID NO: 234

SEQ ID NO: 1556 - DNA, 447 bp, Homo sapiens; identical to SEQ ID NO: 238
  misc_feature: n=a,t,g or c

SEQ ID NO: 1557 - DNA, 417 bp, Homo sapiens
  misc_feature: n=a,t,g or c
ttagtagagacgaggtcttgctatgtggccctggntggtctcgaactccagagcccaaatgatccacccaccttggcctcccaaagtgctgggattacagaaatgagccaccacacctggcctgattgtttttaaatggcagcaagaacagggttggacagcaagggcaaatcacacagtatgtggcatattcagaattggttgtgagtttccagtagaaagcactgagaatatccatagggcaaaatggaatactaataatcctcatttgcctttgcctttgtactgggaaaccagaccttactttaagcccaccaaaggcaaggtttggggcctgccacagcgggatttcaaaaagacaaagcaatgcaagccacgtgttcaaaatgcccttaagtgggctttttcagggtnttt

SEQ ID NO: 1558 - DNA, 295 bp, Homo sapiens; identical to SEQ ID NO: 243
  misc_feature: n=a,t,g or c

SEQ ID NO: 1559 - DNA, 324 bp, Homo sapiens; identical to SEQ ID NO: 931
  misc_feature: n=a,t,g or c

SEQ ID NO: 1560 - DNA, 382 bp, Homo sapiens
  misc_feature: n=a,t,g or c
gatttgagtntttnatttataaatgtacatttactataaaagctgttgcattttagacaacttgttgtttttattttttactgtttctcagaggcattttagaataaatactttaaatgaaagttagtataaccgatatagaacactggcccacccagagcagtaacatcttttgggacgggactcacatatgagggtgggatcatttcagtttgttaaatcttacactgcgtataggataacctataatatggtattgcattaatcacactacatnggaaggggaattgcatgggggaaggtccgcttaggtggaaaaaccaaaagggtccccccttattttttntttaagnggggggggggccttggccctttggggggg

SEQ ID NO: 1561 - DNA, 385 bp, Homo sapiens
  misc_feature: n=a,t,g or c
tttttttttttttgagattgaaaccagacatacttattttaatcatattttatataaaatagacatttacataaatttaattttggaaagacctaggcaaagtatacatcattagactcaatgggagaaatactttatggaagataaattctaacgggcacagccaaagtaacaaaaatgtacatttacatacaactgatccaaacaggaagtaaaagcnttntggaaaaanggancatgttgcaantcatttccccctggacaaanggagggntctgcgtgatttacaggcaattcaattgttttccacntttttaaaggcaagcctggcttctacaggtattttanttccttgggggggagtttcacctcntcttttttcccc

SEQ ID NO: 1562 - DNA, 212 bp, Homo sapiens
  misc_feature: n=a,t,g or c
gtgtttaagtnaaatactctccaaatgtaatacaattcttcagctaaaacaggaataatgagacaaaatggttcgaaaagtacaatagaaaaatattgttcactggtttatttttccaaatgagcatcaggctatttacaaatacgcagccctccaatgacgtgtattaaaatgggcaagtctatcactgtttgaaatctaaatgaaaacaa

SEQ ID NO: 1563 - DNA, 347 bp, Homo sapiens
  misc_feature: n=a,t,g or c
cttccatcannncacttttattatatggtgaagcatccttagtgtgaaattaatggttagatatataaatgcatggcataacatgagaaaatctaggagaaaatatcctcattttaatctaagactatggaattatcaattccaattagacttaatcagcaacttacctttttcaaaaaaagcaaatgcacaaataggcttgataatttaactcttcttaactattaaggctctaggatgtccttaacttttttaaaagancattttaaaaccaaagcactaatttctatacacagtaaaaacaggtacaaatatctgagtttcagatctggcttttgctaggatag

SEQ ID NO: 1564 - DNA, 145 bp, Homo sapiens; identical to SEQ ID NO: 478
  misc_feature: n=a,t,g or c

SEQ ID NO: 1565 - DNA, 448 bp, Homo sapiens
  misc_feature: n=a,t,g or c
ttacatgttatcttttaagacctgtaaggacatgactagtctatttagccagagggcccaaatcactcactgagacaaaacaaagaagagccaaagttccagagggacctgagagctgggttcaggtttcctgcactgtaactctccataggacagtgtcagtaggatgtgccactctgttaagagccaaataagtcacacaaattcagtattctggaaatgaagacttcacaggccaaggatgtttggggatttagccattgcaacaattcttcatctgtgggtgactttttgggaattgggtcccggttaggattgggtaatgggatctgctggtcatccttgtcagttctctttttcacttctcgaggcaagggtgcaggaacagcctccactatgttaggaaccctctttgggcacttgttttcacaggnttaatgnccccnac

SEQ ID NO: 1566 - DNA, 382 bp, Homo sapiens
  misc_feature: n=a,t,g or c
tttttntangaaatgacaagtaccgtttattgtcgttacacaaatgaacccagcctctggcttgggcaccgtcccacggaccagcagatgagcatggtcagccgacccctttccccacccccgagtcatgtgcagtcatacantccagggagaaagtcgcagtntcgantaccggacacaggttcccttggnttggtggngcatctntgatccacagantggcccacctntcggagtggccaacggagtcgntgaaacgttgtcaaataagncaagtaagtgcaggagccctggggntggggggcctntggcttntgncagccgggtggggaggagggatntccaaggtttctgcggggtagggcctcggcttccanacctc

SEQ ID NO: 1567 - DNA, 181 bp, Homo sapiens
ttttttcaagtgaacatacaacttttctttataagtatgtaaataaatttcatagcactacaaaaatatcaatgtcatctgagaagtttacagtggtcccagtactgtaggagagaattaaataaaataaaatagctgtagataattaaaagctaattagataaatcaagttacagtatca

SEQ ID NO: 1568 - DNA, 194 bp, Homo sapiens
  misc_feature: n=a,t,g or c
acaaatattttacatttattataggaatacaataaagaggttctgcagacacatgagtggtaactggtctattggaaaagaaaagacaattaaaaaatgatctaagtttacaaaaatgntgantcatgctttaaaaatgtagaaacanttaaaaantatcctacaatgttagccaangttcaaagtgtatttct

SEQ ID NO: 1569 - DNA, 333 bp, Homo sapiens
  misc_feature: n=a,t,g or c
ccgctcgagttttttttttttttttttgtgctcaaacattttaatcatttctgccctgtnactcccaccccagatccaagcgccanccagttccggtgggggctcagtcctccggagtccaggagtcagggctcgggggcgctcagcggccagtgggcaagattggggcctttcctgtcctcgaagntgcacaaaggtggncccagcccagancacagggagagggcagagagatgtgctcatcagtcttggcaggcgggccgggagcagtcttccagaaacaggtgggagccagggctnattttcatagccaagggtcccatgagcttccca

SEQ ID NO: 1570 - DNA, 283 bp, Homo sapiens
  misc_feature: n=a,t,g or c
gcaaatcataaggaagtttttattgggtcctgtacagaagagaaatgctccgttgtcaaaaaactacaaagggatccctggctctgggtgtgctatgaagacaactccctccccagtnagcccagggaacaggctggatgctggacaaagtttgggagggagctccaggnccagggtcctccanttggggtctccccctttatgtttntaaaaaccgcagnttggagtatttagaggnctntgtcccctgcaagtattgccgttggntatgaaacacacagag

SEQ ID NO: 1571 - DNA, 163 bp, Homo sapiens
ttttttttttatttttttttactgttgaccatgtagttttatttcatcagtactcccatttttaatggattcaggcagcaccccagagtacaggactgagttcctaggggtggcctgacccagcagctgtcttcttttccaggaggaaaaagctttttattaa

SEQ ID NO: 1572 - DNA, 548 bp, Homo sapiens
  misc_feature: n=a,t,g or c
tggggcagananaagnnctttattgatnnnntcagnaatgcagggctggcacccatcagcttcaaaccacatcttatcgcatccactcctntccncttccnnncccattttgccctntttcagggtgaaatcttgctttcaggcaagggcttccggccagccttgcattagttctcagctatggtcttctgaacccagtcctgggatggaagtcaccttcacatacacaccatactcagccacagcacagctcttatcaaagcttaagatcccagtcgcataccagggtgtcctcctccaggggtcgtggaacgggcaaagggcactgcccgcatcgccataggcagggtgtctttcttgggtactttaggacatggccaggcacaggagggtgtgtttcatttcagtatgggggcttgcacccctacangggctctttcgggtgttcttctttttcgggggacttgttgctggcctttcataatgncttatggatttgggttttgggtcaggcacagganggcattgacatacttcagatggggnca

SEQ ID NO: 1573 - DNA, 418 bp, Homo sapiens
  misc_feature: n=a,t,g or c
tttttttttaattccaaggagtgggaaggttttaatgagcatcccagagggccnaggggatacaaactccaaatccagcctttatatcatcattatttcaagcaacaggaggaggctcagcttgcttagctcattcccagatgaagaggcagctggagggaagtccctgaaagtgcctntctacccagcagaggggntaagggaaagtggagaggtntctgctgntgctnctgctgctgctgctgctgttgctgctaccantgccaccaagagcagggagacctcaagcaccaagctgacctttgggaggtcagggacggacccagattcaggcaggattttgggcaggaacatcagacattggganggttagatgcagacttgaacaggttaagaaacctnttaaggggtcccccgg

SEQ ID NO: 1574 - DNA, 339 bp, Homo sapiens
  misc_feature: n=a,t,g or c
tttttctgaaaatcagccttttaatctagttgaacccaacgagtgnaggaaagaactaaaacatttttttccttcagattttgattataagaataactgggtcagaggtgtcttttccataggaaactgacatcccctatgtcctcaganttnttttttttttttttttntncaaaaaaatgcataaaagattttcaacncatgngcatgccacacatttccatccccaccccaccctgccccaccctctacaggcacacatattcacacaccaaaggganttcttcccgtaaccggggaacagaatgtaaaanattccatccaagnggccaccgntac

SEQ ID NO: 1575 - DNA, 492 bp, Homo sapiens; identical to SEQ ID NO: 263
  misc_feature: n=a,t,g or c

SEQ ID NO: 1576 - DNA, 493 bp, Homo sapiens; identical to SEQ ID NO: 264
  misc_feature: n=a,t,g or c

SEQ ID NO: 1577 - DNA, 389 bp, Homo sapiens
  misc_feature: n=a,t,g or c
acagggacatgntaggaaacgatgaacctaactgggcatgaagatgtctagggaaaaaacaaggaagagtaaaaagttacacagaatctatgcagcggcaacaaaatcacttttaagggtgcaggagaaaaactaatgcaaatcttaggtcattagggagtctccgagccattcacataatttgcatttcttacactccttatccacagcacaatgaaaccccaagagaatccatctggagagagcgaaaggggatggattccgggtgttttggggtnagggacagggggagaaggtccngtttcaacaaatgtgacatacggggaaagtcagacgactttaactntaaacttngataatggnagttacaaacccaaataatcaggcag

SEQ ID NO: 1578 - DNA, 305 bp, Homo sapiens; identical to SEQ ID NO: 936
  misc_feature: n=a,t,g or c

SEQ ID NO: 1579 - DNA, 429 bp, Homo sapiens; identical to SEQ ID NO: 937
  misc_feature: n=a,t,g or c

SEQ ID NO: 1580 - DNA, 419 bp, Homo sapiens; identical to SEQ ID NO: 185

SEQ ID NO: 1581 - DNA, 2383 bp, Homo sapiens; identical to SEQ ID NO: 187

SEQ ID NO: 1582 - DNA, 1137 bp, Homo sapiens
gaattccgggcgcggcgtccggggcgagtgacacgcagagctgaagccatggttcatcaggtgctctaccgggcgctggtctccaccaagtggctggcggagtccatcaggactggcaagctggggcccggcctgcgggtgctggacgcgtcctggtactcaccaggcacccgagaggcccgcaaggagtacctcgagcgccacgtacccggcgcctctttctttgacatagaagagtgccgggacacggcgtcgccctacgagatgatgctgcccagcgaggctggcttcgccgagtatgtgggccgcctgggcatcagcaaccacacgcacgtggtggtgtatgatggtgaacacctgggcagcttctatgctccccgggtctggtggatgttccgtgtgtttggccaccgcaccgtatcagtgctcaatggtggcttccggaactggctgaaggagggccacccggtgacatccgagccctcacgcccagaaccggccgtcttcaaagccacactggaccgctccctgctcaagacctacgagcaggtgctggagaaccttgaatctaagaggttccagctggtggattcaaggtctcaagggcggttcctgggcaccgagccggagccggatgcagtaggactggactcgggccatatccgtggtgccgtcaacatgcctttcatggacttcctgactgaggatggcttcgagaagggcccagaagagctccgtgctctgttccagaccaagaaggtggatctctcgcagcctctcattgccacgtgccgcaagggagtcaccgcctgccacgtggccttggctgcctacctctgcggcaagcctgatgtggccgtgtacgatggctcctggtccgagtggtttcgccgggcccccccagagagccgtgtgtcccagggaaagtctgagaaggcctgagccgtgacctcttctgcttactgtaactgcggccggtttagtgaccccatgacttacagccggttcttacctcttaggtgaaggagatgacatgttttttagaattgctgtgcaaggctcaccctctctctgtcaacactggaataaactttgccttttctgaaaaaaaaaaaaaaaaaaaaaaaaccggaattc

SEQ ID NO: 1583 - DNA, 2491 bp, Homo sapiens
ctggcaggcaggactgggatcgaggcccagaaaacggagcagcgggcaccagggaggcctggaacggggcgagcgccatgagcaacaaatgcgacgtggtcgtggtggggggcggcatctcaggtatggcagcagccaaacttctgcatgactctggactgaatgtggttgttctggaagcccgggaccgtgtgggaggcaggacttacactcttaggaaccaaaaggttaaatatgtggaccttggaggatcctatgttggaccaacccagaatcgtatcttgagattagccaaggagctaggattggagacctacaaagtgaatgaggttgagcgtctgatccaccatgtaaagggcaaatcataccccttcagggggccattcccacctgtatggaatccaattacctacttagatcataacaacttttggaggacaatggatgacatggggcgagagattccgagtgatgccccatggaaggctccccttgcagaagagtgggacaacatgacaatgaaggagctactggacaagctctgctggactgaatctgcaaagcagcttgccactctctttgtgaacctgtgtgtcactgcagagacccatgaggtctctgctctctggttcctgtggtatgtgaagcagtgtggaggcacaacaagaatcatctcgacaacaaatggaggacaggagaggaaatttgtgggcggatctggtcaagtgagtgagcggataatggacctccttggagaccgagtgaagctggagaggcctgtgatctacattgaccagacaagagaaaatgtccttgtggagaccctaaaccatgagatgtatgaggctaaatatgtgattagtgctattcctcctactctgggcatgaagattcacttcaatccccctctgccaatgatgagaaaccagatgatcactcgtgtgcctttgggttcagtcatcaagtgtatagtttattataaagagcctttctggaggaaaaaggattactgtggaaccatgattattgatggagaagaagctccagttgcctacacgttggatgataccaaacctgaaggcaactatgctgccataatgggatttatcctggcccacaaagccagaaaactggcacgtcttaccaaagaggaaaggttgaagaaactttgtgaactctatgccaaggttctgggttccctagaagctctggagccagtgcattatgaagaaaagaactggtgtgaggagcagtactctgggggctgctacacaacttatttcccccctgggatcctgactcaatatggaagggttctacgccagccagtggacaggatttactttgcaggcaccgagactgccacacactggagcggctacatggagggggctgtagaggccggggagagagcagcccgagagatcctgcatgccatggggaagattccagaggatgaaatctggcagtcagaaccagagtctgtggatgtccctgcacagcccatcaccaccacctttttggagagacatttgccctccgtgccaggcctgctcaggctgattggattgaccaccatcttttcagcaacggctcttggcttcctggcccacaaaagggggctacttgtgagagtctaaagagagagggtgtctgtaatcacactctcttcttactgtatttgggatatgagtttggggaaagagttgcaagtaaagttccatgaagacaaatagtgtggagtgaggcgggggagcatgaagataaatccaactctgactgtaaaatacaatggtatctctttctccgttgtggcccctgcttagtgtcccttacctggcttagcgttctgtttcaccagtttccaagtttattgccctcaaatctttagaatagttaaattggcttgtttaaggttcttgctgccccacaacacaccttgcccatgcacaggatgaattttttcctaccattatggctttgtgcttgttcttcctcttacctgtatagcctcacttccctagttctttgcattcgtccttaggtactgtattgttacagctgaaagacagtaaagaccatttagtcctcaccttctgttttagagttgagcaaactgaagcccacagaggtggaacttaattacctaagagccacaataagccactggtatctgggggactagaacacaaataattgcttttcccacctctttggatgttttccccaattatcctccttcactccctgtcatagttaccgatggtgtcccgttgtgtgggtttactctgtgctaagttgtcttacacttctcaaatgctactcagtatatagccttaactcttactgttttgtgcggtgtgtctccagctgattttaacttttttgatggtagaaattttatctcttcttccttttgtatcctccattgtatcttcatacaaaggacagtacacacttgggtaattaaaaataaaagttgattgaccat

SEQ ID NO: 1584 - DNA, 2061 bp, Homo sapiens
tgttccgcgatcttctcaggctctcctagcagcatccatcgccgccaccctatcttcactggcttcaccttctccttctctcttcgttgctgagcgacaagcttcctagcgctatgactgtcgtctccgtcccgcagcgggagccgctcgtcctgggtggccgccttgcgccgcttggcttttcctcccgaggttactttggggccctcccgatggtgaccacggctccgcctcctttaccccggatcccggacccccgggcactgcccccgaccctcttcctccctcatttcctagggggagatggcccgtgtctgaccccccagcctcgcgctccagcagctctgcccaaccgcagcctcgccgtggcgggaggcactcctcgggcagcgccgaagaagcggcgaaagaagaaggtgcgggccagccccgcagggcagctgcccagccgcttccaccagtaccagcagcaccggccgagtctggagggcggccggagccccgcgaccggcccgagcggagcgcaggaggtcccgggcccggccgccgccttggccccgagtcctgcagccgcagccggcacggagggagccagccccgaccttgccccgctgcggcccgcggctcccggccaaacccccctcaggaaagaggttttaaaatcaaagatgggaaaatcggagaaaattgcccttccccatggccagcttgttcatggtatacacttgtatgagcaaccaaagataaacagacagaaaagcaaatataacttgccactaaccaagatcacctctgcaaaaagaaatgaaaacaacttttggcaggattctgtttcatctgacagaattcagaagcaggaaaaaaagccttttaaaaataccgagaacattaaaaattcgcatttgaagaaatcagcatttctaactgaagtgagccaaaaggaaaattatgctggggcaaagtttagtgatccaccttctcctagtgttcttccaaagcctcctagtcactggatgggaagcactgttgaaaattccaaccaaaacagggagctgatggcagtacacttaaaaaccctcctcaaagttcaaacttagatttcagatttcagtatgtgtgtaaaacataatttttcccatatccctggactcttgagaaaattggtacagaaatggaaatttgccttgttgcaacatacaattgcaaaagatgagtttaaaaaattacatacaaacagcttgtattatattttatattttgtaaatactgtataccatgtattatgtgtatattgttcatacttgagaggtatattatagttttgttatgaaagtatgtattttgccctgcccacattgcaggtgttttgtatatatacaatggataaattttaagtgtgtgctaaggcacatggaagaccgattttatttgcacaaggtactgagatttttttcaagaaacagctgtcaaatctcaaggtgaagatctaaatgtgaacagtttactaatgcactactgaagtttaaatctgtggcacaatcaatgtaagcatggggtttgtttctctaaattgatttgtaatctgaaattactgaacaactcctattcccatttttgctaaactcaatttctggttttggtatatatccattccagcttaatgcctctaattttaatgccaacaaaattggttgtaatcaaattttaaaataataataatttggcccccccttttaaaatagtcttgactctttgtgtgtgactgtttctcatgtttgaatgtgtgactaggagatgattttgtgtggttggatttttttgacttctactttactggctgagtgtgagccgccatgcctggccataatctacattttcttaccaggagcagcattgaggtttttgagcatagtacttgactactctagaggctgagacgggagcatctcttgagcctgagaagtggagattgcaattgagctaggatcaggccactgcactccagcctgggtaacagacgctgtctcaaaaaaaaggccaagagaaagtaagggagacaga

SEQ ID NO: 1585 - DNA, 2512 bp, Homo sapiens; identical to SEQ ID NO: 265

SEQ ID NO: 1586 - DNA, 1908 bp, Homo sapiens; identical to SEQ ID NO: 266

SEQ ID NO: 1587 - DNA, 577 bp, Homo sapiens
caccactgctttagaggccagatttttctggaggggattcctctacacatgctacctccagttagcaggaggggaaggaagggttgggagtcttggggagtctcaccatcaactcctcctcctgctgctgttccatttgcctcagacatggagttggagctgctgcggggcagccaggccatcatgctgcgctcagcggacctgacaggactggagaagcgtgtggagcagatccgtgaccacatcaatgggcgcgtgctctactatgccacctgcaagtgatgctacagcttccagcccgttgccccactcatctgccgcctttgcttttggttggggggcagattgggttggaatgctttccatctccaggagactttcatgtagcccaaagtacagcctggaccacccctggtgtgtacctagtaagattaccctgagctgcagctgagcctgagccaatgggacagttacacttgacagacaaagatggtggagattggcatgccattgaaactaagagctctcaagtcaaggaagctgggctgggcagtatcccccgcctttagttctccac

SEQ ID NO: 1588 - DNA, 3100 bp, Homo sapiens; identical to SEQ ID NO: 267

SEQ ID NO: 1589 - DNA, 7720 bp, Homo sapiens; identical to SEQ ID NO: 946

SEQ ID NO: 1590 - DNA, 1280 bp, Homo sapiens
aaaagaacgaatccagcaccaaaacgtgctacaacatggatgaacttcgatgactttgtgccacatgaaagaagaagccagccacaaaaggccatatattgtatgaaatgaaatgtccagaatgggcaaacccatagagacacaaaaatctccgccacctccctactctcggctgtctcctcgcgacgagtacaagccactggatctgtccgattccacattgtcttacactgaaacggaggctaccaactccctcatcactgctccgggtgaattctcagacgccagcatgtctccggacgccaccaagccgagccactggtgcagcgtggcgtactgggagcaccggacgcgcgtgggccgcctctatgcggtgtacgaccaggccgtcagcatcttctacgacctacctcagggcagcggcttctgcctgggccagctcaacctggagcagcgcagcgagtcggtgcggcgaacgcgcagcaagatcggcttcggcatcctgctcagcaaggagcccgacggcgtgtgggcctacaaccgcggcgagcaccccatcttcgtcaactccccgacgctggacgcgcccggcggccgcgccctggtcgtgcgcaaggtgccccccggctactccatcaaggtgttcgacttcgagcgctcgggcctgcagcacgcgcccgagcccgacgccgccgacggcccctacgaccccaacagcgtccgcatcagcttcgccaagggctgggggccctgctactcccggcagttcatcacctcctgcccctgctggctggagatcctcctcaacaaccccagatagtggcggccccggcgggaggggcgggtgggaggccgcggccaccgccacctgccggcctcgagaggggccgatgcccagagacacagcccccacggacaaaaccccccagatatcatctacctagatttaatataaagttttatatattatatggaaatatatattatacttgtaattatggagtcatttttacaatgtaattatttatgtatggtgcaatgtgtgtatatggacaaaacaagaaagacgcactttggcttataattctttcaatacagatatattttctttctcttcctccttcctcttccttactttttatatatatatataaagaaaatgatacagcagagctaggtggaaaagcctgggtttggtgtatggtttttgagatattaatgcccagacaaaaagctaataccagtcactcgataataaagtattcgcattataaaaaaga

SEQ ID NO: 1591 - DNA, 1800 bp, Homo sapiens; identical to SEQ ID NO: 947

SEQ ID NO: 1592 - DNA, 577 bp, Homo sapiens
gagctccgacggcactgacggccatggcgcgttcgaacctcccgctggcgctgggcctggccctggtcgcattctgcctcctggcgctgccacgcgatgcccgggcccggccgcaggagcgcatggtcggagaactccgggacctgtcgcccgacgacccgcaggtgcagaaggcggcgcaggcggccgtggccagctacaacatgggcagcaacagcatctactacttccgagacacgcacatcatcaaggcgcagagccagctggtggccggcatcaagtacttcctgacgatggagatggggagcacagactgccgcaagaccagggtcactggagaccacgtcgacctcaccacttgccccctggcagcaggggcgcagcaggagaagctgcgctgtgactttgaggtccttgtggttccctggcagaactcctctcagctcctaaagcacaactgtgtgcagatgtgataagtccccgagggcgaaggccattgggtttggggccatggtggagggcacttcaggtccgtgggccgtatctgtcacaataaatggccagtgctgcttcttgc

SEQ ID NO: 1593 - DNA, 2061 bp, Homo sapiens
ggatcccagcaagcgtcctttatgtatgaaaaggaagaagaaaatttccccatgaaacatattcaaagtagagaacaatctttttgattccattgttattttaattgtatacagacataggagtctttgcataattagacttttccttctttcaggactgtggatgcaaagccctggacccccagacgttataggacattactcctcagctttgcagcccggtgatgtgaagcgaaacaccatttccccttttttatggcggaagaaaacagaacacaactgcaaaggggcttttccctcccctgctcatcctctttccccaaatgaattttggtttgctgtggactctattctgctgaggaactgttcttgttgggcaaatgtagatcttgtctactctgtggcaggaaaaggccttttctttcattttgtaagaaagagcacagagttcctcctgtacctgctccagctgtgcctgcagcccctcacggccgggtgatgccattcccaaactgctcagcccccagcactgtggtggccacagctgtgggtgtcttgctggggctggagtgtgggctgggtctgctgggcaacgcggtggcgctgtggaccttcctgttccgggtcagggtgtggaagccgtacgctgtctacctgctcaacctggccctggctgacctgctgttggctgcgtgcctgcctttcctggccgccttctacctgagcctccaggcttggcatctgggccgtgtgggctgctgggccctgcgcttcctgctggacctcagccgcagcgtggggatggccttcctggccgccgtggctttggaccggtacctccgtgtggtccaccctcggcttaaggtcaacctgctgtctcctcaggcggccctgggggtctcgggcctcgtctggctcctgatggtcgccctcacctgcccgggcttgctcatctctgaggccgcccagaactccaccaggtgccacagtttctactccagggcagacggctccttcagcatcatctggcaggaagcactctcctgccttcagtttgtcctcccctttggcctcatcgtgttctgcaatgcaggcatcatcagggctctccagaaaagactccgggagcctgagaaacagcccaagcttcagcgggcccaggcactggtcaccttggtggtggtgctgtttgctctgtgctttctgccctgcttcctggccagagtcctgatgcacatcttccagaatctggggagctgcagggccctttgtgcagtggctcatacctcggatgtcacgggcagcctcacctacctgcacagtgtcgtcaaccccgtggtatactgcttctccagccccaccttcaggagctcctatcggagggtcttccacaccctccgaggcaaagggcaggcagcagagcccccagatttcaaccccagagactcctattcctgacaacagccagcgtcctcaacgcccgtgtttatggaactacctgcgacctaaataataattactcctactttgggattctggaagaagaagaagtcttaagactgcaatacaaggatcagagcataaacatgggcacagttgctgcaggtgtggtcttatactttgttgaccagggtggtcctctgtgattttaccttgtagagtggcaaatcaaaaatgaacaagctagaacctcctcctacccaactatgatgcagattcagttgctgaactgaaaagtcgggcagctactccatctccacacttgaagaaaatgtaatttgctaaatcagtgaaggaagagaagaaagccgggtgatggcatctttccaactcttacttggtctcagcaagtcattttcatttattatgcttcagttttaaatacaaaaaaaaaactatgttttcttcccacctgctgtgcagactggggatgaccgacatcagaaagtgccctggttctaaaaagagactctgctgtatataaggtactgtcgtacatgctagcctttatttggaacataacatttttgttttcataaaattttgcttcatttttctaga

SEQ ID NO: 1594 - DNA, 4244 bp, Homo sapiens
ggcgcagtagcagcgagcagcagagtccgcacgctccggcgaggggcagaagagcgcgagggagcgcggggcagcagaagcgagagccgagcgcggacccagccaggacccacagccctccccagctgcccaggaagagccccagccatggaacaccagctcctgtgctgcgaagtggaaaccatccgccgcgcgtaccccgatgccaacctcctcaacgaccgggtgctgcgggccatgctgaaggcggaggagacctgcgcgccctcggtgtcctacttcaaatgtgtgcagaaggaggtcctgccgtccatgcggaagatcgtcgccacctggatgctggaggtctgcgaggaacagaagtgcgaggaggaggtcttcccgctggccatgaactacctggaccgcttcctgtcgctggagcccgtgaaaaagagccgcctgcagctgctgggggccacttgcatgttcgtggcctctaagatgaaggagaccatccccctgacggccgagaagctgtgcatctacaccgacaactccatccggcccgaggagctgctgcaaatggagctgctcctggtgaacaagctcaagtggaacctggccgcaatgaccccgcacgatttcattgaacacttcctctccaaaatgccagaggcggaggagaacaaacagatcatccgcaaacacgcgcagaccttcgttgccctctgtgccacagatgtgaagttcatttccaatccgccctccatggtggcagcggggagcgtggtggccgcagtgcaaggcctgaacctgaggagccccaacaacttcctgtcctactaccgcctcacacgcttcctctccagagtgatcaagtgtgacccagactgcctccgggcctgccaggagcagatcgaagccctgctggagtcaagcctgcgccaggcccagcagaacatggaccccaaggccgccgaggaggaggaagaggaggaggaggaggtggacctggcttgcacacccaccgacgtgcgggacgtggacatctgagggcgccaggcaggcgggcgccaccgccacccgcagcgagggcggagccggccccaggtgctccactgacagtccctcctctccggagcattttgataccagaagggaaagcttcattctccttgttgttggttgttttttcctttgctctttcccccttccatctctgacttaagcaaaagaaaaagattacccaaaaactgtctttaaaagagagagagagaaaaaaaaaatagtatttgcataaccctgagcggtgggggaggagggttgtgctacagatgatagaggattttataccccaataatcaactcgtttttatattaatgtacttgtttctctgttgtaagaataggcattaacacaaaggaggcgtctcgggagaggattaggttccatcctttacgtgtttaaaaaaaagcataaaaacattttaaaaacatagaaaaattcagcaaaccatttttaaagtagaagagggttttaggtagaaaaacatattcttgtgcttttcctgataaagcacagctgtagtggggttctaggcatctctgtactttgcttgctcatatgcatgtagtcactttataagtcattgtatgttattatattccgtaggtagatgtgtaacctcttcaccttattcatggctgaagtcacctcttggttacagtagcgtagcgtggccgtgtgcatgtcctttgcgcctgtgaccaccaccccaacaaaccatccagtgacaaaccatccagtggaggtttgtcgggcaccagccagcgtagcagggtcgggaaaggccacctgtcccactcctacgatacgctactataaagagaagacgaaatagtgacataatatattctatttttatactcttcctatttttgtagtgacctgtttatgagatgctggttttctacccaacggccctgcagccagctcacgtccaggttcaacccacagctacttggtttgtgttcttcttcatattctaaaaccattccatttccaagcactttcagtccaataggtgtaggaaatagcgctgtttttgttgtgtgtgcagggagggcagttttctaatggaatggtttgggaatatccatgtacttgtttgcaagcaggactttgaggcaagtgtgggccactgtggtggcagtggaggtggggtgtttgggaggctgcgtgccagtcaagaagaaaaaggtttgcattctcacattgccaggatgataagttcctttccttttctttaaagaagttgaagtttaggaatcctttggtgccaactggtgtttgaaagtagggacctcagaggtttacctagagaacaggtggtttttaagggttatcttagatgtttcacaccggaaggtttttaaacactaaaatatataatttatagttaaggctaaaaagtatatttattgcagaggatgttcataaggccagtatgatttataaatgcaatctccccttgatttaaacacacagatacacacacacacacacacacacacacaaaccttctgcctttgatgttacagatttaatacagtttatttttaaagatagatccttttataggtgagaaaaaaacaatctggaagaaaaaaaccacacaaagacattgattcagcctgtttggcgtttcccagagtcatctgattggacaggcatgggtgcaaggaaaattagggtactcaacctaagttcggttccgatgaattcttatcccctgccccttcctttaaaaaacttagtgacaaaatagacaatttgcacatcttggctatgtaattcttgtaatttttatttaggaagtgttgaagggaggtggcaagagtgtggaggctgacgtgtgagggaggacaggcgggaggaggtgtgaggaggaggctcccgaggggaaggggcggtgcccacaccggggacaggccgcagctccattttcttattgcgctgctaccgttgacttccaggcacggtttggaaatattcacatcgcttctgtgtatctctttcacattgtttgctgctattggaggatcagttttttgttttacaatgtcatatactgccatgtactagttttagttttctcttagaacattgtattacagatgccttttttgtagttttttttttttttatgtgatcaattttgacttaatgtgattactgctctattccaaaaaggttgctgtttcacaatacctcatgcttcacttagccatggtggacccagcgggcaggttctgcctgctttggcgggcagacacgcgggcgcgatcccacacaggctggcgggggccggccccgaggccgcgtgcgtgagaaccgcgccggtgtccccagagaccaggctgtgtccctcttctcttccctgcgcctgtgatgctgggcacttcatctgatcgggggcgtagcatcatagtagtttttacagctgtgttatwctttgcgtgtagctatggaagttgcataattattattattattattataacaagtgtgtcttacgtgccaccacggcgttgtacctgtaggactctcattcgggatgattggaatagcttctggaatttgttcaagttttgggtatgtttaatctgttatgtactagtgttctgtttgttattgttttgttaattacaccataatgctaatttaaagagactccaaatctcaatgaagccagctcacagtgctgtgtgccccggtcacctagcaagctgccgaaccaaaagaatttgcaccccgctgcgggcccacgtggttggggccctgccctggcagggtcatcctgtgctcggaggccatctcgggcacaggcccaccccgccccacccctccagaacacggctcacgcttacctcaaccatcctggctgcggcgtctgtctgaaccacgcgggggccttgagggacgctttgtctgtcgtgatggggcaagggcacaagtcctggatgttgtgtgtrtcgagaggccaaaggctggtggcaagtgcacggggcacagcggagtctgtcctgtgacgcgcaagtctgagggtctgggcggcgggcggctgggtctgtgcatttctggttgcaccgcggcgcttcccagcaccaacatgtaaccggcatgtttccagcagaagacaaaaagacaaacatgaaagtctagaaataaaactggtaaaaccccaaaaaaaaaaaaaaaa

SEQ ID NO: 1595 - DNA, 874 bp, Homo sapiens; identical to SEQ ID NO: 285

SEQ ID NO: 1596 - DNA, 511 bp, Homo sapiens
  misc_feature: n=a,t,g or c
cccgatttctcccggaacctctgctcagcctggtgaaccacacaggccagcgctctgacatgcagaaggtgaccctgggcctgcttgtgttcctggcaggctttcctgtcctggacgccaatgacctagaagataaaaacagtcctttctactatgactggcacagcctccaggttggcgggctcatctgcgctggggttctgtgcgccatgggcatcatcatcgtcatgagtgcaaaatgcaaatgcaagtttggccagaagtccggtcaccatccaggggagactccacctctcatcaccccaggctcagcccaaagctgatgaggacagaccagctgaaattgggtggaggaccgttctctgtccccaggtcctgtctctgcacagaaacttgaactccaggatggaattcttcctcctctgctgggactcctttgcatggcagggcctcatctcacctctcgcaagagggtctctttgttcaattttttttaatctaaaatgattan

SEQ ID NO: 1597 - DNA, 838 bp, Homo sapiens; identical to SEQ ID NO: 949

SEQ ID NO: 1598 - DNA, 3451 bp, Homo sapiens; identical to SEQ ID NO: 214

SEQ ID NO: 1599 - DNA, 4268 bp, Homo sapiens; identical to SEQ ID NO: 293
  misc_feature: n=a,t,g or c

SEQ ID NO: 1600 - DNA, 2279 bp, Homo sapiens; identical to SEQ ID NO: 269

SEQ ID NO: 1601 - DNA, 14800 bp, Homo sapiens
cgcccgggcaggtggcggcagagctgaagtgagcggagccaccaggaggccatgtcgggtgaggacgctgaggtccgggcagtctctgaagatgtctccaatggaagcagtggctcgcccagccctggggacacactgccctggaaccttgggaaaacgcagcggagccggcgcagcgggggtggcgctgggagcaacgggagtgtcctggacccagctgagcgggcggtcattcgcatcgcagatgagcgggatcgtgtgcagaagaaaaccttcaccaagtgggtcaacaagcacctcatcaaggcccagaggcacatcagtgacctgtatgaagacctccgcgatggccacaacctcatctccctgctggaggtcctctcgggggacagcctgccccgggagaaggggaggatgcgtttccacaagctgcagaatgtccagattgccctggactacctccggcaccgccaggtgaagctggtgaacatcagggatgatgacatcgctgacggcaaccccaagctgacccttggcctcatctggacaatcattctgcacttccagatctcagatatccaggtgagtgggcagtcggaggacatgacggccaaggagaagctgctgctgtggtcgcagcgaatggtggaggggtaccagggcctgcgatgcgacaacttcacctccagctggagagacggccgcctcttcaatgccatcatccaccggcacaagcccctgctcatcgacatgaacaaggtgtaccggcagaccaacctggagaacctggaccaggccttctctgtggcggagcgggacctgggagtgacgcggctcctggaccctgaggacgtggatgtccctcagcccgacgagaagtccatcatcacctacgtctcgtcgctgtatgacgccatgccccgcgtgccggacgtgcaggatggggtgagggccaacgagctgcagctgcgctggcaggagtaccgggagctggtgctgctgctgcttcagtggatgcgacaccacacggccgcctttgaggaacgcaggttcccctccagcttcgaggagattgagatcctgtggtctcagttcctgaagtttaaggagatggagctaccagccaaggaggccgacaagaacaggtccaagggcatctaccaatccctggagggagcggtgcaagcaggccagctcaaggtgccccctggctaccacccgctggatgtggagaaggagtggggcaagctgcacgtggccatcctggagcgggagaagcagctccgcagcgagtttgagaggctggagtgtcttcagcgcatcgtgaccaagctgcagatggaggcggggctgtgtgaggagcagctgaaccaggccgacgccctgctgcagtcggatgtccggctgctggctgcaggcaaagtgccacagcgggcgggggaggtggaacgggacttggacaaggcggatagcatgatccggctgctcttcaacgacgtgcagaccctcaaggatggacggcacccgcagggcgagcagatgtaccgcagggtgtaccgtctgcacgagcgcctggtagccatccgcaccgagtacaacctacggctgaaggcaggcgtggcggcccctgcaacccaggtggcccaggtgactctgcagagtgtgcagaggcgccccgagctggaggactccactctgcgctacctgcaggacctgctggcctgggtggaggagaaccagcaccgtgtggatggcgctgagtggggtgtggacctgcccagcgtggaggcgcagctgggcagccaccgaggcctgcaccagtccatcgaagaattccgggccaagatcgagcgggcacggagtgacgagggccagctctcccccgccacccggggtgcctaccgtgactgcctgggtcggctggacctgcagtacgccaagctgctgaactcctccaaggcccgcctcaggtccctggagagcttgcacagctttgtggcagccgccactaaggagctaatgtggctgaatgagaaggaggaggaggaggtgggcttcgactggagcgaccgcaacaccaacatgaccgccaagaaggagagctactcggcgctgatgcgggagctggagctgaaggagaagaagatcaaggagctccaaaatgctggggaccggctgctgcgggaggaccacccggcccggcccacggtggagtccttccaggcggccctgcagacgcagtggagctggatgctacagctgtgctgctgtatcgaggcacacctgaaggagaacgctgcctactttcagttcttctcagatgtgcgggaggccgaggggcagttgcagaagctgcaggaggcactgcgtaggaaatacagttgtgatcgctccgccaccgtcacccggctggaggacctgctgcaggatgcccaggacgagaaggaacagctgaacgagtacaagggccacctctcaggcctggccaagcgggccaaggccgtcgtgcagctgaagccccgccacccagcccaccccatgcggggccgcctgcccctgctggccgtgtgcgactataagcaggtggaggtgactgtgcacaagggtgacgagtgccagctggtgggccctgcacagccgtcccactggaaggtgctcagcagctccggcagcgaggccgccgtgccctccgtgtgcttcctggtgcccccgcccaaccaggaggcccaggaggccgtcaccaggctggaggcccagcaccaggccctggtcacgctgtggcaccagttgcacgtggacatgaagagccttctggcctggcagagccttcgccgcgacgtgcagctcatccgctcgtggtccctggccacgttccgcaccctgaagccagaggagcagcgccaagccctgcacagcctggagctgcactaccaggccttcctgcgggacagccaggacgcgggcggcttcggacccgaggaccggctgatggctgagcgcgagtacggctcctgcagccaccactaccagcagctgctgcagagcctggaacagggtgcacaggaagagtctcgctgccagcgctgcatctccgagctcaaagacatccggctgcagctggaggcctgtgagacgcgcaccgtgcaccgcctgcggctgccgctggacaaagagccggcacgggagtgtgcccagcgcatcgccgagcagcagaaggcacaggcagaggtggaggggctgggcaagggggtcgcccggctctctgccgaggccgagaaggtcttggccctaccagagccatcgcctgcggcccccacgctgcgctcggagctggagctgacgctgggcaagctggagcaggtccgcagcctgtctgccatctacctggagaagctcaagaccatcagcctggtgatccgcggcacgcagggggccgaggaggtgctcagggcccacgaggagcagctcaaggaggcccaggccgtgccggccaccctcccggagctcgaggccaccaaggcctctctgaagaagctgcgggcccaggccgaggcacagcagcccacgttcgacgccctgcgggatgagctgcggggggcacaggaggtgggggagcgactgcagcagcggcacggggagcgggacttggaggtggagcgctggcgggagcgggtcgcccaggtgcttgagcgctggcaggctgtgctggcccagaccgacttgcggcagcgcgagctcgagcaactgggccgccagctgcgttactaccgcgagagtgcagaccccttgggcgcctggctgcaggacgccaggcggcggcaggagcagatccaggccatgccgctggccgacagccaggctgtgcgggagcagctgcggcaggagcaggccctgctggaggagatcgagcgccacggcgagaaggtcgaggagtgccagaggtttgcgaaacagtacatcaacgccatcaaggactatgaactccagctggtgacgtacaaggcgcagcttgagccggtggcctccccggccaagaagcccaaggtccagtcgggatcagagagtgtcatccaggagtacgtggacctgcgtacgcactacagcgagctgaccacactgacgagccagtacatcaagttcatcagcgagactctgcggcgcatggaggaggaggagaggctggctgagcagcagcgggcagaggagcgcgagcggctggccgaggtggaggccgcgctggagaagcagcggcagctggccgaggcgcacgcccaggcaaaggcacaggcggagcgggaggcgaaggagctgcagcagcgcatgcaggaggaggtggtgcggcgggaggaggcggcggtggacgcgcagcagcagaagcgcagcattcaggaggagctgcagcagctgcggcagagctcggaggcggagatccaggccaaggcccggcaggcagaggcggctgagcgcagccggctgcgcatcgaggaggagatccgcgtggtgcgcctgcagttggaggccaccgagcgccagcgtggcggggctgagggggagctgcaggcactgcgtgcacgggcggaggaggctgaggcacaaaagcgacaggcgcaggaggaggccgagcgcttgcggaggcaggtgcaggacgagagccagcgtaagcggcaggcggaggtggagctggcctcgcgcgtgaaggccgagaccgaggcggcgcgcgagaagcagcgggccctgcaggccctggaggagctgcggctgcaggcggaggaggcggagcggcgcctgcggcaggccgaggtggagcgagcgcggcaggtacaggtggccctggagacggcgcagcgcagtgcagaggcggagctgcagagcaaacgcgcctccttcgccgagaagacggcacagctggagcgctccctgcaggaggaacacgtggctgtggcacagctgcgggaggaggctgagcggcgggcacagcagcaggccgaggccgagcgggcgcgcgaggaggcagagcgggagctggagcgctggcagctcaaggccaacgaggcgctacggctgcggctgcaggcggaggaggtggcgcagcagaagagcctggcgcaggccgaggctgagaagcagaaggaggaggcggagcgcgaggcgcggcggcgcggcaaggcggaggagcaggccgtccggcagcgggagctggctgaacaagagctggagaagcagcggcagctggcggaaggcaccgcgcagcagcgcctggccgcggagcaggagttgatccggctgcgggccgagacggagcagggggagcagcagcggcagctgctggaggaggagctggcccggctgcagcgtgaggcggctgcagccacgcagaaacggcaggagctggaagccgagctggccaaggtgcgggccgagatggaggtgctgctggccagcaaggcgagggctgaggaggagtcgcgctccaccagcgagaagtccaagcagaggctggaggccgaggccggccggttccgcgagctggccgaggaggccgcccgcctgcgtgccctggcggaagaggccaagcggcagcggcagctggccgaggaagacgcggcgcggcagcgggccgaggcggagcgggtgcttgcggagaagctggccgccatcggcgaggccacgcggctcaagacggaggcggagatcgcgctcaaggagaaggaggcggagaacgagcgcctgcggcggctggcggaggacgaggccttccagcggcggcggctggaggagcaggccgcgcaacacaaggctgacatcgaggagcgcctggcccagctgcgcaaggcatcggacagcgagctggagcggcagaaggggctggtggaggacacgctgaggcagcggcggcaggtggaggaagagatcctggcgctgaaggcgagcttcgagaaggcggccgctggcaaggcggagctggagctggagctgggacgcatccgcagcaacgcggaggacacgctgcgcagcaaggagcaggccgagctggaggccgcgaggcagcggcagctggcggcggaggaggagcggcggcgccgtgaggctgaggagcgcgtgcagaagagcctggcggccgaggaggaggccgcacggcagcggaaggcggcgctggaggaagtcgagcggctgaaagccaacgtggaggaggcgcggcgcctgcgggagcgagcggagcaggagtcggcgcggcagctgcagctggcccaggaggccgcccagaagcggctgcaggcggaagagaaggcacacgccttcgcggtgcagcagaaggagcaggagctacagcagacgctgcagcaggagcagagcgtgctggaccagctgcgcggcgaggcggaggcggcccggcgggcggctgaggaggcggaggaggcccgggtgcaggcggagcgtgaggcggcgcaggcccggcggcaggtggaagaggccgagcggctgaagcagtcggcagaggagcaggcacaggcccgggctcaggcacaggcggctgcagagaagctgcgcaaggaggccgagcaagaggcggcgcggcgggcacaggcggagcaggcggccctgcggcagaagcaggcagctgacgcggagatggagaagcataagaaattcgccgagcagacgctgcggcagaaggcgcaggtggagcaggagctgacaacactgcggctgcagctggaggagaccgaccaccagaagaacctgctggacgaggagctgcagcggctgaaggcggaggccacggaggccgcacgccagcgcagccaggtggaggaggagctcttctcggtgcgcgtgcagatggaggagctgagcaagctcaaggcacgcatcgaggctgagaaccgcgcactcatcttgcgtgacaaggacaatacgcagcgcttcctgcaggaggaggctgagaagatgaagcaggtggcggaggaggccgcgcggctgagtgtggcggcccaagaggctgcgcgactgcggcagctggcagaggaggacctggcacagcagcgggccttggcagagaagatgctcaaggagaagatgcaggcggtgcaggaggccacgcgactcaaggctgaggcggaactgctgcagcagcagaaggagcttgcgcaggagcaggcgcggcggctgcaggaggacaaggagcagatggcgcagcagctggcggaggagacgcagggcttccagcggacgctggaggccgagcggcagcggcagctggagatgagcgctgaggctgagcgcctcaagctgcgtgtggccgagatgagccgagcccaggcccgcgctgaggaggacgcccagcgcttccggaagcaggcggaggagatcggtgagaagctgcaccgcacggagctcgccacccaggagaaggtgaccctggtgcagacactggagatccagcgacagcagagtgaccatgatgccgagcgcctgcgggaggccatcgctgagctggagcgtgagaaggagaagctccaacaggaggccaaactgctgcagctcaagtctgaggagatgcagacggtgcagcaggagcagctgctgcaggagacgcaggccctgcagcaaagcttcctctctgaaaaggacagcctgctacagcgggagcgcttcatcgagcaggagaaggccaagctggagcagctcttccaggacgaggtggccaaggcacagcagctgcgtgaggagcagcagcggcagcagcagcagatggagcaggaacggcagcggctggtggccagcatggaggaggcgcggcggcggcagcatgaggccgaggagggcgtgcggcgcaagcaggaggagctgcagcagctggagcagcagcggcggcagcaggaggagctgctggctgaggagaaccagaggctgcgtgagcagctgcagctcctggaggagcagcaccgggccgcgctggcgcactcagaggaggtcactgcctcgcaggtggctgccacaaagaccctgcccaatggccgggatgcacttgatggccccgcggcagaggcagagccggagcacagcttcgatggcctgcggcggaaggtgtcagctcagaggctgcaggaggccggcatcctgagtgcggaggagctgcagcggttggcgcagggccacaccacggtggacgagctcgcacggcgggaagacgtgcgccactacctgcagggccgcagcagtatcgcagggctgttgctgaaggccaccaatgagaagctgagtgtttacgccgccctgcagaggcagctgctgagtcccggcacggccctcatcctgctggaggcgcaggcggcctcaggcttcctgctggaccctgtgcggaaccggcggctgaccgtcaacgaggctgtgaaggagggtgtggtgggccccgagctgcaccacaagctgctgtcggccgagcgcgccgtcactggctacaaggacccctacactggccagcagatctctctcttccaagccatgcagaagggcctcatcgtccgggagcacggcatccgcctgctggaggcccagatcgccacgggcggcgttatcgaccccgtgcacagccaccgcgtgcccgtggacgtggcctaccggcgcggctacttcgacgaggagatgaaccgcgtcctggcggaccccagcgacgacaccaagggcttctttgaccccaacacgcacgagaacctcacgtacctgcagctactggagcgctgcgtggaggaccccgagacgggcctgtgccttctgccactcacggataaggctgccgagggcggggagctggtctacactgactccgaggcccgggacgtctttgagaaggccaccgtgtctgcgccgttcggcaagttccagggcaagacggtgaccatttgggagatcatcaactcggaatacttcacggcagagcagcggcgggacctgctgcggcagttccgcacgggccggatcacagtggagaagatcatcaagatcatcatcacggtggtggaggagcaggagcagaagggccggctttgctttgagggcctgcgcagcctggtgccagccgccgagctgctggagagcagggtcatcgaccgcgagctctaccagcagctgcagcgaggtgagcgctctgtgcgagacgtagccgaggtggacactgtgcggcgggctctccggggtgccaacgtcatcgcgggtgtatggctggaggaggcggggcagaagctgagtatctacaatgccctgaagaaagacctgctgccatccgacatggccgtggccctgttggaagcccaggccggcaccgggcacatcatcgaccccgccaccagcgcccggctgaccgtggacgaggcagtgcgtgctggcctggtgggccccgagtttcatgagaagctgctatcagccgagaaggctgtgacagggtacagggacccctacacagggcagagcgtctccctgttccaggccctgaagaagggcctcattccccgggagcagggcctgcgcctgttggacgcccagctgtccacgggcggcatcgtggaccccagcaagagccaccgcgtgcccctggatgtcgcctgcgcccgaggctgcctggatgaggagaccagcagggccctgtcggcaccaagggccgacgccaaggcctacagtgaccccagcacaggggagccggccacctacggcgagctccagcagcggtgccggcccgaccagctgaccgggctgagcctgctgccgctctcagaaaaggctgctcgggcccggcaggaggagctctactcagagctgcaggcccgtgagacctttgaaaagaccccggttgaggtccccgtgggtggcttcaagggcaggacggtgacggtgtgggagctcatcagctctgagtacttcactgcggagcagcggcaggagctgttgcgtcagttccgcacgggcaaggtcaccgtggagaaggtcatcaagattctcattaccatcgtggaggaggtggagaccctgcggcaggagaggctgtccttcagcggcctccgtgcccctgtgccagccagcgagctcctggcttccggggtcctcagcagagcccagtttgagcagctcaaggacggcaagacgacggtcaaggacctttcggagctgggctccgtgcggacgctgctgcagggcagtggctgcctcgccggcatctacctggaggacaccaaggagaaggtgtccatctacgaggccatgcgccggggcctgctgagagccacaacggctgcgctcctgctggaggcgcaggcggccactggcttcctggtggaccccgtgcggaaccagcgcctgtatgtccacgaggccgtgaaggcgggcgtggtgggccccgagcttcacgagcagctgctgtctgccgagaaggccgtcaccggctacagagacccctactcgggcagcaccatctccctcttccaggccatgcagaagggcctggttctccggcagcacggcatccgcctgctggaggcccagatcgccacgggcggcatcatcgaccccgtgcacagccaccgcgtgcctgtggacgtggcctaccagcgcggctacttcagtgaggagatgaaccgcgtcctggcggaccccagcgacgacaccaagggcttctttgaccccaacacgcatgagaacctcacgtacaggcagctgctggagcggtgcgtggaggaccccgagacgggcttgcgccttctgccactgaaaggggcggagaaggctgaggtggtggagaccacgcaggtgtacactgaggaggagacaagaagggcatttgaagagacacagatcgacattcccggcggcggcagccacggcggctccaccatgtccctgtgggaggtgatgcagtcggacctgatccccgaggagcagcgggcccagctgatggctgacttccaggccggccgggtgaccaaggaacgcatgatcatcatcatcatcgagatcattgagaagacagagatcatccgccagcagggtctggcctcctatgactacgtgcgccgccgcctcacggctgaggacctgttcgaggctcggatcatctctctcgagacctacaacctgctccgggagggcaccaggagcctccgtgaggctctcgaggcggagtccgcctggtgctacctctatggcacgggctccgtggctggtgtctacctgcccggttccaggcagacactgagcatctaccaggctctcaagaaagggctgctgagtgccgaggtggcccgcctgctgctggaggcacaggcagccacaggcttcctgctggacccggtgaagggggagcggctgactgtggatgaggctgtgcggaagggcctcgtggggcccgagctgcacgaccgcctgctctcggctgagcgggcggtcaccggctaccgtgacccctacaccgagcagaccatctcgctcttccaggccatgaagaaggagctgatccctactgaggaggccctgcggctgctggatgcccagctggccaccggcggcatcgtggacccccgcctgggcttccaccttcccctggaggtggcttaccagcgtggctacctcaacaaggacacgcacgaccagctgtcagagcccagcgaggtgcgcagctacgtggacccgtccaccgacgagcgcctcagctacacgcagctgctcaggcggtgccgtcgtgacgacggcaccggccagctgctcctgccactgtcggacgcccgcaagctgaccttccgtggcctgcggaagcagatcaccatggaggagctggtgcgctcgcaggtcatggacgaggccacggcgctgcagctgcgggagggcctgacctccatcgaggaggtcaccaagaacttgcagaagttcctggaaggcaccagctgcatcgctggtgtcttcgtggacgccaccaaggaacggctctcggtgtaccaggccatgaagaaaggcatcatccgccccggcacagcctttgagctcctggaggcgcaggcggccaccggttacgtcatcgaccccatcaagggactgaagctgacggtggaggaggctgtgcgtatgggcattgtgggccccgagttcaaggacaagctgctgtcggccgagcgcgccgtcactgggtacaaggacccctactctgggaagctcatctccctcttccaggccatgaagaagggcctgatcctgaaggaccatggcatccgcctgctggaggcccagatcgccacgggcggcatcatcgaccctgaggagagccaccggctgcccgtggaggtggcctacaagcgcggcctcttcgatgaggagatgaacgagatcctgaccgacccctcggacgacaccaagggcttctttgaccctaacacggaggagaacctcacctacctgcagctgatggagcgttgtatcactgacccccagacgggcctgtgtctcttgccgctgaaggagaagaagcgggagcggaagacgtcctccaagtcctccgtgcgcaagcgccgagtggtcatcgtggaccccgagacgggcaaggagatgtcagtgtacgaggcctaccgcaagggcctgattgaccaccagacgtacctggagctgtccgagcaggagtgcgagtgggaggagatcaccatctcctcctcggacggcgtggtcaagtccatgatcatcgaccgccgctccgggcgccagtacgacatcgatgatgccatcgccaagaacctcatcgaccgctcggcactggaccagtaccgcgccggcacgctctccatcaccgagttcgccgacatgctctcgggcaacgccggtggtttccgctcccgttcctcctcggtgggatcctcctcctcctaccccatcagccccgccgtctccaggacccagctggcctcctggtcagaccccactgaggagacgggccccgtggctggcatcctggacacggagacgctggagaaggtgtccatcaccgaggccatgcaccggaacctggtggataacatcacggggcagcggctgctggaggcgcaggcctgcaccgggggcatcatcgaccccagcaccggtgagcgcttccctgtcaccgacgccgtcaacaagggcctggtggacaagatcatggtggaccgcatcaacctggcccagaaggccttttgcggcttcgaggacccacgcaccaagaccaagatgtcggccgcccaggccctgaagaagggctggctctactacgaggccggccagcgcttcctggaggtgcagtacctgaccggcggcttgatcgagcccgacacgccgggccgcgtgcccctggacgaggccctgcagcgcggcacggtggacgcccgcaccgcacagaagctgcgtgacgtgggcgcctactccaagtacctcacctgccctaagaccaagctcaagatctcctataaggacgcgctggaccgcagcatggtggaggagggcacggggctgcggctgctggaggctgccgcgcagtccaccaagggctactacagcccctacagcgtcagcggctccggctctaccgctggctcccgcaccggctcgcgcaccggctcccgggccggctcccgccgcggcagctttgacgccaccggctccggcttctccatgaccttctcttcatcctcctactcctcctcgggctacggccgccgctacgcctcggggtcctcggcctccctggggggccctgagtctgccgtggcctgaggctgcctgcgcccaccccgctctgcatgcggcccagcccggctcccaccgaggcgcgggggccgttttcaacgcttaaaggtgtcttcctcccaagtggtgcctaaagtttaaccaaaaagaccagactaatatattaatatatatctgctgtccagacagcctgtatcttgggggacagggctggcccagccctgctggccgcctcaccccctcgggtctcctcactcccttctacctgccactcacacagccaggtgccttggagggtcccaagctgggccccagcccaccctcctgtcttcccagggtagcccgcctgccagtcctagctgcacagggcagctgggcccaaccctgtctgtagagggccctggtgtttctagcactggcctgcacggtgggccttgctggggacggggggccccagtcagcctctctcccagtctacccagagaagccccttccccatgggaagacgaggccctcgggcccagcccccacagtgctgtctgatctgtgctttccagctcaccccccacactcactcctgagacccctggcctccggcgtcagcctccagcctctgttcccctagtaagtgccttccatgtcggcctctaaccccaggccccgaggacccagacccagtggggaggcggacgttccagccggcatggctgggaactgcagacctgtcctcctggtgggtccaggggcccctccagcttgtggagccccacactggggtgccgcctgcccgtctctctcccatggagccccagccccctttgggcccagggacaccagccaggctctgtgctgaccctcctgttgcgcccagccctggtctcagcagcgaccacccctgcctccaccctctgagctttgcatgttccactaaccccgggcgggtggcaggtggaggtgtcaggctgctggcgcctctgcaagggcagaacactaacctgaccgtgggcggggccttgcggtatccgcccccaataaaagcaattccaacctt

SEQ ID NO: 1602 - DNA, 3388 bp, Homo sapiens
aattcggagaacctgctacaggaacagctgcaggcagagacagagctgtatgcagaggctgaggagatgcgggtgcggctggcggccaagaagcaggagctggaggagatactgcatgagatggaggcccgcctggaggaggaggaagacaggggccagcagctacaggctgaaaggaagaagatggcccagcagatgctggaccttgaagaacagctggaggaggaggaagctgccaggcagaagctgcaacttgagaaggtcacggctgaggccaagatcaagaaactggaggatgagatcctggtcatggatgatcagaacaataaactatcaaaagaacgaaaactccttgaggagaggattagtgacttaacgacaaatcttgcagaagaggaagaaaaggccaagaatcttaccaagctgaaaaacaagcatgaatctatgatttcagaactggaagtgcggctaaagaaggaagagaagagccgacaggagctggagaagctgaaacggaagctggagggtgatgccagcgacttccacgagcagatcgctgacctccaggcgcagatcgcagagctcaagatgcagctggccaagaaggaggaggagctgcaggcggccctggccaggcttgacgatgaaatcgctcagaagaacaatgccctgaagaagatccgggagctggagggccacatctcagacctccaggaggacctggactcagagcgggccgccaggaacaaggctgaaaagcagaagcgagacctcggcgaggagctggaggccctaaagacagagctggaagacacactggacagcacagccactcagcaggagctcagggccaagagggagcaggaggtgacggtgctgaagaaggccctggatgaagagacgcggtcccatgaggctcaggtccaggagatgaggcagaaacacgcacaggcggtggaggagctcacagagcagcttgagcagttcaagagggccaaggcgaacctagacaagaataagcagacgctggagaaagagaacgcagacctggccggggagctgcgggtcctgggccaggccaagcaggaggtggaacataagaagaagaagctggaggcgcaggtgcaggagctgcagtccaagtgcagcgatggggagcgggcccgggcggagctcaatgacaaagtccacaagctgcagaatgaagttgagagcgtcacagggatgcttaacgaggccgaggggaaggccattaagctggccaaggacgtggcgtccctcagttcccagctccaggacacccaggagttgcttcaagaagaaacccggcagaagctcaacgtgtctacgaagctgcgccagctggaggaggagcggaacagcctgcaagaccagctggacgaggagatggaggccaagcagaacctggagcgccacatctccactctcaacatccagctctccgactcgaagaagaagctgcaggactttgccagcaccgtggaagctctggaagaggggaagaagaggttccagaaggagatcgagaacctcacccagcagtacgaggagaaggcggccgcttatgataaactggaaaagaccaagaacaggcttcagcaggagctggacgacctggttgttgatttggacaaccagcggcaactcgtgtccaacctggaaaagaagcagaggaaatttgatcagttgttagccgaggagaaaaacatctcttccaaatacgcggatgagagggacagagctgaggcagaagccagggagaaggaaaccaaggccctgtccctggctcgggcccttgaagaggccttggaagccaaagaggaactcgagcggaccaacaaaatgctcaaagccgaaatggaagacctggtcagctccaaggatgacgtgggcaagaacgtccatgagctggagaagtccaagcgggccctggagacccagatggaggagatgaagacgcagctggaagagctggaggacgagctgcaagcctcggaggacgccaaactgcggctggaagtcaacatgcaggcgctcaagggccagttcgaaagggatctccaagcccgggacgagcagaatgaggagaagaggaggcaactgcagagacagcttcacgagtatgagacggaactggaagacgagcgaaacgaacgtgccctggcagctgcagcaaagaagaagctggaaggggacctgaaagacctggagcttcaggccgactctgccatcaaggggagggaggaagccatcaagcagctacgcaaactgcaggctcagatgaaggactttcaaagagagctggaagatgcccgtgcctccagagatgagatctttgccacagccaaagagaatgagaagaaagccaagagcttggaagcagacctcatgcagctacaagaggacctcgccgccgctgagagggctcgcaaacaagcggacctcgagaaggaggaactggcagaggagctggccagtagcctgtcgggaaggaacgcactccaggacgagaagcgccgcctggaggcccggatcgcccagctggaggaggagctggaggaggagcagggcaacatggaggccatgagcgaccgggtccgcaaagccacacagcaggccgagcagctcagcaacgagctggccacagagcgcagcacggcccagaagaatgagagtgcccggcagcagctcgagcggcagaacaaggagctccggagcaagctccacgagatggagggggccgtcaagtccaagttcaagtccaccatcgcggcgctggaggccaagattgcacagctggaggagcaggtcgagcaggaggccagagagaaacaggcagccaccaagtcgctgaagcagaaagacaagaagctgaaggaaatcttgctgcaggtggaggacgagcgcaagatggccgagcagtacaaggagcaggcagagaaaggcaatgccagggtcaagcagctcaagaggcagctggaggaggcagaggaggagtcccagcgcatcaacgccaaccgcaggaagctgcagcgggagctggatgaggccacggagagcaacgaggccatgggccgtgaggtgaacgcactcaagagcaagctcagagggccccccccacaggaaacttcgcagtgatgcaccaggcgaggaaacgagacctctttcgttccttctagaaggtctggaggacgtagagttattgaaaatgcagatggttctgaggaggaactggacactcgagacgcagacttcaatggaaccaaggccagtgaataagcaactttctacagttttgcaccacggcaagaaaaccaaaaaccaaaacaaacaaacaaaaaaaacccaacaacaacccgaacaagac

SEQ ID NO: 1603 - DNA, 2834 bp, Homo sapiens; identical to SEQ ID NO: 286

SEQ ID NO: 1604 - DNA, 1599 bp, Homo sapiens; identical to SEQ ID NO: 789

SEQ ID NO: 1605 - DNA, 655 bp, Homo sapiens; identical to SEQ ID NO: 212

SEQ ID NO: 1606 - DNA, 3128 bp, Homo sapiens; identical to SEQ ID NO: 268

SEQ ID NO: 1607 - DNA, 5938 bp, Homo sapiens
tttccaggcactctcattcatagagccagcgggcgcgggcgggacgggcgccccgcggccggacccagccagggcaccacgctgcccggccctgcgccgccaggcacttctttccggggctcctagggacgccagaaggaagtcaacctctgctgcttctccttggcctgcgttggaccttcctttttttgttgtttttttttgtttttcccctttcttccttttgaattaactggcttcttggctggatgttttcaacttctttcctggctgcgaactttttccccaattgttttccttttacaacagggggagaaagtgctctgtggtccgaggcgagccgtgaagttgcgtgtgcgtggcagtgtgcgtggcaggatgtgcgtgcgtgtgtaacccgagccgcccgatctgtttcgatctgcgccgcggagccctccctcaaggcccgctccacctgcttggcggttacgcggcgctcgtgggtgttcgtgccttcggagcagctaaccggcgggtgctgggcgacggtggaggagtatcgttctcgctgcttgcccgagtcagggctgagtcaccccagctgatgtagacagtggctgccttccgaagagtgcgtgtttgcatgtgtgtgactctgcggctgctcaactcccaacaaaccagaggaccagccacaaacttaaccaacatccccaaacccgagttcacagatgtgggagagctgtagaaccctgagtgtcatcgactgggccttcttatgattgttgttttaagattagctgaagatctctgaaacgctgaattttctgcactgagcgtttgacagaattcattgagagaacagagaacatgacaagtacttctagctcagcactgctccaactactgaagctgattttcaaggctacttaaaaaaatctgcagcgtacattaatggatttctgttgtgtttaaattctccacagattgtattgtaaatattttatgaagtagagcatatgtatatatttatatatacgtgcacatacattagtagcactacctttggaagtctcagctcttgcttttcgggactgaagccagttttgcatgataaaagtggccttgttacgggagataattgtgttctgttgggactttagacaaaactcacctgcaaaaaactgacaggcattaactactggaacttccaaataatgtgtttgctgatcgttttactcttcgcataaatattttaggaagtgtatgagaattttgccttcaggaacttttctaacagccaaagacagaacttaacctctgcaagcaagattcgtggaagatagtctccactttttaatgcactaagcaatcggttgctaggagcccatcctgggtcagaggccgatccgcagaaccagaacgttttcccctcctggactgttagtaacttagtctccctcctcccctaaccacccccgcccccccccaccccccgcagtaataaaggcccctgaacgtgtatgttggtctcccgggagctgcttgctgaagatccgcgcccctgtcgccgtctggtaggagctgtttgcagggtcctaactcaatcggcttgttgtgatgcgtatccccgtagatgccagcacgagccgccgcttcacgccgccttccaccgcgctgagcccaggcaagatgagcgaggcgttgccgctgggcgccccggacgccggcgctgccctggccggcaagctgaggagcggcgaccgcagcatggtggaggtgctggccgaccacccgggcgagctggtgcgcaccgacagccccaacttcctctgctccgtgctgcctacgcactggcgctgcaacaagaccctgcccatcgctttcaaggtggtggccctaggggatgttccagatggcactctggtcactgtgatggctggcaatgatgaaaactactcggctgagctgagaaatgctaccgcagccatgaagaaccaggttgcaagatttaatgacctcaggtttgtcggtcgaagtggaagagggaaaagcttcactctgaccatcactgtcttcacaaacccaccgcaagtcgccacctaccacagagccatcaaaatcacagtggatgggccccgagaacctcgaaataatgagtgtgtatatggcaactaccctgaaatacctttggaagaaatgccagatgcagatggagtagccagcactccctccctcaatattcaagagccatgctctcctgccacatccagtgaagcattcactccaaaggagggttctccttacaaagcccccatctacatccctgatgatatccccattcctgctgagtttgaacttcgagagtcaaatatgcctggggcaggactaggaatatggaccaaaaggaagatcgaagtaggtgaaaagtttgggccttatgtgggagagcagaggtcaaacctgaaagaccccagttatggatgggagatcttagacgaattttacaatgtgaagttctgcatagatgccagtcaaccagatgttggaagctggctcaagtacattagattcgctggctgttatgatcagcacaaccttgttgcatgccagataaatgatcagatattctatagagtagttgcagacattgcgccgggagaggagcttctgctgttcatgaagagcgaagactatccccatgaaactatggcgccggatatccacgaagaacggcaatatcgctgcgaagactgtgaccagctctttgaatctaaggctgaactagcagatcaccaaaagtttccatgcagtactcctcactcagcattttcaatggttgaagaggactttcagcaaaaactcgaaagcgagaatgatctccaagagatacacacgatccaggagtgtaaggaatgtgaccaagtttttcctgatttgcaaagcctggagaaacacatgctgtcacatactgaagagagggaatacaagtgtgatcagtgtcccaaggcatttaactggaagtccaatttaattcgccaccagatgtcacatgacagtggaaagcactatgaatgtgaaaactgtgccaaggttttcacggaccctagcaaccttcagcggcacattcgctctcagcatgtcggtgcccgggcccatgcatgcccggagtgtggcaaaacgtttgccacttcgtcgggcctcaaacaacacaagcacatccacagcagtgtgaagccctttatctgtgaggtctgccataaatcctatactcagttttcaaacctttgccgtcataagcgcatgcatgctgattgcagaacccaaatcaagtgcaaagactgtggacaaatgttcagcactacgtcttccttaaataaacacaggaggttttgtgagggcaagaaccattttgcggcaggtggattttttggccaaggcatttcacttcctggaaccccagctatggataaaacgtccatggttaatatgagtcatgccaacccgggccttgctgactattttggcgccaataggcatcctgctggtcttacctttccaacagctcctggattttcttttagcttccctggtctgtttccttccggcttgtaccacaggcctcctttgatacctgctagttctcctgttaaaggactatcaagtactgaacagacaaacaaaagtcaaagtcccctcatgacacatcctcagatactgccagctacacaggatattttgaaggcactatctaaacacccatctgtaggggacaataagccagtggagctccagcccgagaggtcctctgaagagaggccctttgagaaaatcagtgaccagtcagagagtagtgaccttgatgatgtcagtacaccaagtggcagtgacctggaaacaacctcgggctctgatctggaaagtgacattgaaagtgataaagagaaatttaaagaaaatggtaaaatgttcaaagacaaagtaagccctcttcagaatctggcttcaataaataataagaaagaatacagcaatcattccattttctcaccatctttagaggagcagactgcggtgtcaggagctgtgaatgattctataaaggctattgcttctattgctgaaaaatactttggttcaacaggactggtggggctgcaagacaaaaaagttggagctttaccttacccttccatgtttcccctcccattttttccagcattctctcaatcaatgtacccatttcctgatagagacttgagatcgttacctttgaaaatggaaccccaatcaccaggtgaagtaaagaaactgcagaagggcagctctgagtccccctttgatctcaccactaagcgaaaggatgagaagcccttgactccagtcccctccaagcctccagtgacacctgccacaagccaagaccagcccctggatctaagtatgggcagtaggagtagagccagtgggacaaagctgactgagcctcgaaaaaaccacgtgtttgggggaaaaaaaggaagcaacgtcgaatcaagacctgcttcagatggttccttgcagcatgcaagacccactcctttctttatggaccctatttacagagtagagaaaagaaaactaactgacccacttgaagctttaaaagagaaatacttgaggccttctccaggattcttgtttcacccacaaatgtcagctattgaaaacatggcagaaaagctagagagcttcagtgccctgaaacctgaggccagtgagctcttacagtcagtgccctctatgttcaacttcagggcgcctcccaatgccctgccagagaaccttctgcggaagggaaaggagcgctatacctgcagatactgtggcaagatttttccaaggtctgcaaacctaacacggcacttgagaacccacacaggagagcagccttacagatgcaaatactgtgacagatcatttagcatatcttctaacttgcaaaggcatgttcgcaacatccacaataaagagaagccatttaagtgtcacttatgtgataggtgttttggtcaacaaaccaatttagacagacacctaaagaaacatgagaatgggaacatgtccggtacagcaacatcgtcgcctcattctgaactggaaagtacaggtgcgattctggatgacaaagaagatgcttacttcacagaaattcgaaatttcattgggaacagcaaccatggcagccaatctcccaggaatgtggaggagagaatgaatggcagtcattttaaagatgaaaaggctttggtgaccagtcaaaattcagacttgctggatgatgaagaagttgaagatgaggtgttgttagatgaggaggatgaagacaatgatattactggaaaaacaggaaaggaaccagtgacaagtaatttacatgaaggaaaccctgaggatgactatgaagaaaccagtgccctggagatgagttgcaagacatccccagtgaggtataaagaggaagaatataaaagtggactttctgctctagatcatataaggcacttcacagatagcctcaaaatgaggaaaatggaagataatcaatattctgaagctgagctgtcttcttttagtacttcccatgtgccagaggaacttaagcagccgttacacagaaagtccaaatcgcaggcatatgctatgatgctgtcactgtctgacaaggagtccctccattctacatcccacagttcttccaacgtgtggcacagtatggccagggctgcggcggaatccagtgctatccagtccataagccacgtatgacgttatcaaggttgaccagagtgggaccaagtccaacagtagcatggctctttcatataggactatttacaagactgctgagcagaatgccttataaacctgcagggtcactcatctaaagtctagtgaccttaaactgaatgattta

SEQ ID NO: 1608 - DNA, 224 bp, Homo sapiens
agaatgttctgaagcagaacgagactctgatcgctgtctttttttctttgaatggctatcatcatcatctgaatctgaccccgatcgagagcgggaacgtttcctatgatgttttttagatttcttagaatgtttcttgttctttgaatgatgatgctgacattcatgctcaagcacatgcataaaatctttaaatatttcggttttctttcagattctagagt

SEQ ID NO: 1609 - DNA, 476 bp, Homo sapiens
  misc_feature: n=a,t,g or c
tcgtnncntcggttctgagaaataggcactggcaatttacacatgccttgctgtgtaatctcactatatttgctcaggcaaagtgggagaagcagccttaggttttcattctagagatgccggctttcccacctgatcggcttagagttcacgattgactgttttgggcttcatttcaccctctacataacaagcgggtggactagatgccttagcaagggtccgtgttgtgtggtgtctccagccacgcactcagctcaatcttagcacagttaaaaaatgcctttctagcaagttatctgcccagtgcctgaaaaagtatcatttcttgtgttcaataaaaaagcctcctaatttaatcaaggacctatggagataactgtcttttagttgtggcattgcaaggatacaaatgcagagatattttaaaagtgatccttctgtaagagtgaacccacgatatgatctggnagcaa

SEQ ID NO: 1610 - DNA, 191 bp, Homo sapiens
aaaaccatagctttataaatcagtggaaagtggcttacagagagacctatcagatgtgtttacatcacatcttattcactttttttaacagctctaatgctttggcattgctatgttcatattcatgtattccctatttatagctctgatagcttaactctcctagcagtctgtctatcagatgtgcacat

SEQ ID NO: 1611 - DNA, 355 bp, Homo sapiens
gccgtccacgccgctcttgacagtccgaggatcagaaggactgtacatggtgaatggaccaccacattttacagaaagcacagtgtttccaagggaatctgggaagaattgcaaagtctgtatctttagtaagggatgggaccctgttttgacctgggcaatggagaaaagtaaatattatcagtgtcactaccaagggactactgcactccttcgacctcctgaaggcagtttgccttgaattctcacccaaaaatactgtcctggcaacgtggcagccttacactacttctaaagatggcacacctggtatacccaacctacacctttatgatgtgaaactggggacatgttt

SEQ ID NO: 1612 - DNA, 294 bp, Homo sapiens
gtactttgtgggagccagttcacctcctttcctaaaattcagtgtgatcaccctgttaatggccacactagctctgaaattaatttccaaaatctttgtagtagttcatacccactcagagttataatggcaaacaaacagaaagcattagtacaagcccctcccaacacccttaatttgaatctgaacatgttaaaatttgaggaataaagagacatttttcaatctctttgtctggtttgtcccttgtgcttatggggactccttaatggcatttccagcctgttgctgagg

SEQ ID NO: 1613 - DNA, 472 bp, Homo sapiens; identical to SEQ ID NO: 548

SEQ ID NO: 1614 - DNA, 142 bp, Homo sapiens; identical to SEQ ID NO: 22

SEQ ID NO: 1615 - DNA, 335 bp, Homo sapiens; identical to SEQ ID NO: 957

SEQ ID NO: 1616 - DNA, 529 bp, Homo sapiens
  misc_feature: n=a,t,g or c
gggcggccgntagctgttgctgttgggggaccgctcattcctgccgctgccgtccctgctgcctcatgcggccatcggagttcacctgggctgcacctcagcatgtgaggccgtctataaggatggccgggctggtgtggttgcaaatgatgccggtgaccgagttactccagctgttgttgcttactcagaaaatgaagagattgttggattggcagcaaaacaaagtagaataagaaatatttcaaatacagtaatgaaagtaaagcagatcctgggcagaagctccagtgatccacaagctcagaaatacatcgcggaaagtaaatgtttagtcattgaaaaaaatgggaaattacgatatgaaatagatactggagaagaaacaaaatttgttaacccagaagatgttgccagactgatatttagtaaaatgaaagaaacggcacattctgtattgggctcagatgcaaatgatgtagttattactgtcccgtttgattttggagaaaagccaaaaatgcccttg

SEQ ID NO: 1617 - DNA, 427 bp, Homo sapiens; identical to SEQ ID NO: 959

SEQ ID NO: 1618 - DNA, 377 bp, Homo sapiens
ttttttttgttttttagtaaactttattgtaccgaacaaaaaaaatgattttgcaatgattttctctcccacaaaagcgtgggtgaaaaccagtaacttataaaaatactttcggactctaataatacatacattcacaccttatcttctgagtatttaaatgggggaggttcacctgaaaaaacccatagttttttgcctcaactgacctgtaaaaaagtccacctatatcaactttctgccaatctggagaagatctgttttctttgatctgacgtcatgtgttcacaagcttctaaaatgtttgccaaaattaaagtctgctggatggtttttgccttaacccatattcttccattcattccaaatactatctc

SEQ ID NO: 1619 - DNA, 271 bp, Homo sapiens
caaagtgttaaaaatgctgaagtcatgtcaagtactgtctggagggtttttttaagaaaaggcatttggcatttaactgtctcttgttttatttttaagtttttggaaaccttttgacataaaatgctgccaagtatctaagaaatgtatatactgacagaagatatttgaaagtggaaaattggaaatgaaatatgttgctgggtgcgttaatcacctccgcccaggatttagtcacttgcaggacctctttatagtctaggatggcaga

SEQ ID NO: 1620 - DNA, 1253 bp, Homo sapiens; identical to SEQ ID NO: 40

SEQ ID NO: 1621 - DNA, 3088 bp, Homo sapiens; identical to SEQ ID NO: 45

SEQ ID NO: 1622 - DNA, 484 bp, Homo sapiens
  misc_feature: n=a,t,g or c
cttactagaccagaaaagaacttattccagataagctttgaatatcaattcttacataaactttaggcaaacagggaatagtctagtcaccaaaggaccattctcttgccaatgctgcattccttttgcacttttggattccatatttatcccaaatgctgttgggcacccctagaaataccttgatgttttttctatttatatgcctgcctttggtacttaattttacaaatgctgtaatataaagcatatcaagtttatgtgatacgtatcattgcaagagaatttgtttcaagatttttttttaatgttccagaagatggccaatagaggaacattcaaggggaaatgggggaaacataatttaggaggaacaaggaacaaaccatgttctncaaatttttttttaaaaaaaattaatgggtttaaaatatatggntttggggacgttcctggcccggggtaaccaagggactgtggattt

SEQ ID NO: 1623 - DNA, 462 bp, Homo sapiens
  misc_feature: n=a,t,g or c
ttcggcacaggcaatgcaggtttttgtacttaattatatggtgatttttttactttttaagagcagaaacggaaattgacctccccgccatgtgtttaatattcctcctgcttttacttttgtcattttcttgataatcgtaagccttgagagtgtttgtgaaaaagttttatttcctgttatgtatacataattaaatgaaaattcttcagaaaaagtttgataaattgaattgtggttatgaaactaatttgcatttttatttgcttaagaaagaaagctgtgatagattccagatatgctttttgatgttttcctctgctccagctccaaggaagtcaggcacacctggcattttaggctctgcatgcagccccagcagggcgcggtggtttaaggaatttccattgtttaacngggcngggtgtgaggaagtcttcccttaggcttgggtgggagggg

SEQ ID NO: 1624 - DNA, 1887 bp, Homo sapiens
ccgtttttgttcttctaagcaaaagatctccctctctctagccgatgctccccactcagttcatcccgggaatgggccagggaggaaggttctcatgcatcgccccgagctgccaggcgagcttcgggctccttaaattcacaggccaacagcccgcgtcctctccgcgcaggctcccggttgcccgcggtccccggcccagctccttggcctcctcctcgtcggtccgcccctggtggtcttggcgcccgctcgtccagctcggcgcgccggggaccgccggctgcccggggcagtccgcacgccctcggggatctcggctcccggatccgccgcgccggcaggagccggccgggcctggagggagcaagcggatgcgcccacgcccccggcacggggatggcgcgacagggcccgggctccggggtggggctcggcagagctcctgacagctccggggctcggcagcgcgggaggggggagctccgccgctcgccgctcattcccggctcggggctcccctccactcgctcgggcggcgcggggcccgttcgggccgcccgtcgccgcccccgccccccgcgcgcccgcccgccagcccgcctgcgccctcgctcgccccgcgcgcgttcctagggcgccacctctttgcgactagctcacttctccggcaggtttgcctcggagcgtgtgaacattcctccgctcggttttcaactcgcctccaacctgcgccgcccggccagcatgtctccccgcccgtgaagcgggctgccgcctccctgccgctccggctgccactaacgacccgccctcgccgccacctggccctcctgatcgacgacacacgcacttgaaacttgttctcagggtgtgtggaatcaactttccggaagcaaccagcccaccagaggaggtcccgagcgcgagcggagacgatgcagcggagactggttcagcagtggagcgtcgcggtgttcctgctgagctacgcggtgccctcctgcgggcgctcggtggagggtctcagccgccgcctcaaaagagctgtgtctgaacatcagctcctccatgacaaggggaagtccatccaagatttacggcgacgattcttccttcaccatctgatcgcagaaatccacacagctgaaatccaccccgtccgatttgggtctgatgatgagggcagatacctaactcaggaaactaacaaggtggagacgtacaaagagcagccgctcaagacacctgggaagaaaaagaaaggcaagcccgggaaacgcaaggagcaggaaaagaaaaaacggcgaactcgctctgcctggttagactctggagtgactgggagtgggctagaaggggaccacctgtctgacacctccacaacgtcgctggagctcgattcacggaggcattgaaattttcagcagagaccttccaaggacatattgcaggattctgtaatagtgaacatatggaaagtattagaaatatttattgtctgtaaatactgtaaatgcattggaataaaactgtctcccccattgctctatgaaactgcacattggtcattgtgaatatttttttttttgccaaggctaatccaattattattatcacatttaccataatttattttgtccattgatgtatttattttgtaaatgtatcttggtgctgctgaatttctatattttttgtaacataatgcactttagatatacatatcaagtatgttgataaatgacacaatgaagtgtctctattttgtggttgattttaatgaatgcctaaatataattatccaaattgattttcctttgtgcatgtaaaaataacagtattttaaatttgtaaagaatgtctaataaaatataatctaattac

SEQ ID NO: 1625 - DNA, 1595 bp, Homo sapiens
ccggttcgcaaagaagctgacttcagagggggaaactttcttcttttaggaggcggttagccctgttccacgaacccaggagaactgctggccagattaattagacattgctatgggagacgtgtaaacacactacttatcattgatgcatatataaaaccattttattttcgctattatttcagaggaagcgcctctgatttgtttcttttttccctttttgctctttctggctgtgtggtttggagaaagcacagttggagtagccggttgctaaataagtcccgagcgcgagcggagacgatgcagcggagactggttcagcagtggagcgtcgcggtgttcctgctgagctacgcggtgccctcctgcgggcgctcggtggagggtctcagccgccgcctcaaaagagctgtgtctgaacatcagctcctccatgacaaggggaagtccatccaagatttacggcgacgattcttccttcaccatctgatcgcagaaatccacacagctgaaatcagagctacctcggaggtgtcccctaactccaagccctctcccaacacaaagaaccaccccgtccgatttgggtctgatgatgagggcagatacctaactcaggaaactaacaaggtggagacgtacaaagagcagccgctcaagacacctgggaagaaaaagaaaggcaagcccgggaaacgcaaggagcaggaaaagaaaaaacggcgaactcgctctgcctggttagactctggagtgactgggagtgggctagaaggggaccacctgtctgacacctccacaacgtcgctggagctcgattcacggtaacaggcttctctggcccgtagcctcagcggggtgctctcagctgggttttggagcctcccttctgccttggcttggacaaacctagaattttctccctttatgtatctctatcgattgtgtagcaattgacagagaataactcagaatattgtctgccttaaagcagtacccccctaccacacacacccctgtcctccagcaccatagagaggcgctagagcccattcctctttctccaccgtcacccaacatcaatcctttaccactctaccaaataatttcatattcaagcttcagaagctagtgaccatcttcataatttgctggagaagtgtatttcttccccttactctcacacctgggcaaactttcttcagtgtttttcatttcttacgttctttcacttcaagggagaatatagaagcatttgatattatctacaaacactgcagaacagcatcatgtcataaacgattctgagccattcacactttttatttaattaaatgtatttaattaaatctcaaatttattttaatgtaaagaacttaaattatgttttaaacacatgccttaaatttgtttaattaaatttaactctggtttctaccagctcatacaaaataaatggtttctgaaaatgtttaagtattaacttacaaggatataggtttttctcatgtatctttttgttcattggcaagatgaaataatttttctagggtaatgccgtaggaaaaataaaacttcacatttaaaaaaaa

SEQ ID NO: 1626 - DNA, 214 bp, Homo sapiens; identical to SEQ ID NO: 558

SEQ ID NO: 1627 - DNA, 415 bp, Homo sapiens
  misc_feature: n=a,t,g or c
tcatgctagtatatgacatcaccaatggtaaaagttttgaaaacatcagcaaatggcttagaaacatagatgagcatgccaatgaagatgtggaaagaatgttactaggaaacaagtgtgatatggacgacaaaagagttgtacctaaaggaaaaggagaacagattgcaagggagcatggtattaggttttttgagactagtgcaaaagcaaatattaaacatcggaaaagggcgttcctcacgttagctggaaggatatccttcggaaagacccctgttaaaggagccccaacagtggaaantgttaggntttcagcagtgggagggagggcgttgacaggctggggaggagccaatgcttgctggagcnttctcctgtttcccttcagtttgcccntcccacttacccccnt

SEQ ID NO: 1628 - DNA, 480 bp, Homo sapiens
  misc_feature: n=a,t,g or c
tgcctctagtgcttgctgttttgcataaatatactctagcttcttcaggaccacttcttctgtcttacctgaaagagacgatactttccgtatcagaatattccgttttcgagtcaggagatttttctgtcctatcaatttgtctgcctgatctgttagtccctgaatttcactgaaggctcgagtaagaatgagacttttggaaaccttggaagaatgaagtaatcccaatgtgatctttaatttctcaaagagatccctcatttcaccacgccgccgccgctcattgggcagtgtgtgtccggcgataataagcaaacgcttctccttctttctgtagtttgtcactccagtaatcagggnttcagttttagagggattgggtgggagccttttcgactcctttcagctggnttttcatctgcagagangtgagtacaggagggtgtttgaagaccgtgtgtggggccntgtggtctt

SEQ ID NO: 1629 - DNA, 317 bp, Homo sapiens
gtaatgtggtccacagccatgcccttgaggagctggccactggatactgaacacccctactccattctgcttatgaatcccatttgcctattgaccctgcagttagcatgctgtcaccctgaatcataatcgctcctttgcacctctaaaaagatgcccttaccctcattctggagggctcctgagcctctgcgtaaggctgaacgtctcactgactgagctagtcttcttgttgctcgggtgcatttgaggatggatttggggagggatcaagtgaaccatccctagtcttccctcaataaataacttttaactcc

SEQ ID NO: 1630 - DNA, 2283 bp, Homo sapiens; identical to SEQ ID NO: 560
  misc_feature: n=a,t,g or c

SEQ ID NO: 1631 - DNA, 2863 bp, Homo sapiens
cctggcgaaagcaagacgtggaggttttaccaggggttagtagcttcctcttgctaactttttattgggacaaaaggcaagatggcaccattctgttctcagatatttgtctaaataaagcccttttaattttattttatttttgttgtgggattcttaagcagataagaagaaaagacaccttcctagtgagcagctgcccagctcctgctcagttttgcctcggggtagcacctccagccacagaaagcaagccggtaagtctctccaggtaggacttgctgcaacccagctgctggactgatctgaaacgggactttgcatactctccgaagtatggtgagttggtgctgacttcaaagttgcctggtgaaggaagataaggtggatcgcagagactaaggggagagggagaagccctgctcctcttctccccaccaaggcacaatgagcaacatctgtcagaggctctgggagtacctagaaccctatctcccctgtttgtccacggaggcagacaagtcaaccgtgattgaaaatccaggggccctttgctctccccagtcacagaggcatggccactactttgtggctttgtttgattaccaggctcggactgctgaggacttgagcttccgagcaggtgacaaacttcaagttctggacactttgcatgagggctggtggtttgccagacacttggagaaaagacgagatggctccagtcagcaactacaaggctatattccttctaactacgtggctgaggacagaagcctacaggcagagccgtggttctttggagcaatcggaagatcagatgcagagaaacaactattatattcagaaaacaagaccggttcctttctaatcagagaaagtgaaagccaaaaaggagaattctctctttcagttttagatggagcagttgtaaaacactacagaattaaaagactggatgaagggggattttttctcacgcgaagaagaatcttttcaacactgaacgaatttgtgagccactacaccaagacaagtgacggcctgtgtgtcaagctggggaaaccatgcttaaagatccaggtcccagctccatttgatttgtcgtataaaaccgtggaccaatgggagatagaccgcaactccatacagcttctgaagcgattgggatctggtcagtttggcgaagtatgggaaggtctgtggaacaataccactccagtagcagtgaaaacattaaaaccaggttcaatggatccaaatgacttcctgagggaggcacagataatgaagaacctaagacatccaaagcttatccagctttatgctgtttgcactttagaagatccaatttatattattacagagttgatgagacatggaagtctgcaagaatatctccaaaatgacactggatcaaaaatccatctgactcaacaggtagacatggcggcacaggttgcctctggaatggcctatctggagtctcggaactacattcacagagatctggctgccagaaatgtcctcgttggtgaacataatatctacaaagtagcagattttggacttgccagagtttttaaggtagataatgaagacatctatgaatctagacacgaaataaagctgccggtgaagtggactgcgcccgaagccattcgtagtaataaattcagcattaagtccgatgtatggtcatttggaatccttctttatgaaatcattacttatggcaaaatgccttacagtggtatgacaggtgcccaggtaatccagatgttggctcaaaactatagacttccgcaaccatccaactgtccacagcaattttacaacatcatgttggagtgctggaatgcagagcctaaggaacgacctacatttgagacactgcgttggaaacttgaagactattttgaaacagactcttcatattcagatgcaaataacttcataagatgaacactggagaagaatatcaaataataaagtagcaaaacaaattcaaataatccattccaaaatacaatgttatcaaccaactgcacaatcagtttatcctgacatattcaagtgataggataaagttggccatgtattatgaaaaagattatttgtgcattttattgactgggcaacactgcaggacagtcaaggtgatatataatttcctcactgcctggtaaaattaagcacactaaaccaagttatttttctttttaagagatacttacatttccatttattgtttgaaatgtcgatcaagagaatcaacagatgatagtccaatttttactcagtgactgttgtagcattttcctgtttactgattagagtggttattcattattcctcagattgctgaatcccatcaggctgttattatgaaggaatttgattgctttgctgcacagcaggacctgtgctttgagatttttttttctcttttaaaatatcctgtaactacaatgatggtaaagccatgttaaatgacttgattgtacttggagtaattgcacatttttttctatgcataaaaaaatgatgcagctgttgagaaaacgaagtctttttcattttgcagaaggaaatgatggaatttttctgtacttcagtatgtgtcaactgagagtcatatacattagttttaatctcttaatattgagaatcaggttgcaaaacggatgagttattatctatggaaatgtgagaaatgtctaatagcccataaagtctgagaaataggtatcaaaatagtttaggaaaatgagaggagaacagtagattgctgtggcctagacttctgagtaattaataaagaaaaagaagtaccctttggcctacaaaaaaaaaaaaaaaa

SEQ ID NO: 1632 - DNA, 2618 bp, Homo sapiens
gcggggctggcacccgggccgaggctctgattctggggggaggccgactccaccctggctggaggaactgggtgctcctgcccgctggcccctcgcgcgtgaggatctatctcaggctaagaaatggcatttcaaaaggcagtgaaagggacgattcttgttggaggaggtgctcttgcaactgttttaggactttctcagtttgctcattacagaaggaaacaaatgaacctggcctatgttaaagcagcagactgcatttcagaaccagttaacagggagcctccttccagagaagctcagctactgactttgcaaaacacatctgaatttgatatccttgttattggaggaggagcaacaggaagtggctgtgcgctagatgctgtcaccagaggactaaaaacagcccttgtagaaagagatgatttctcatcagggaccagcagcagaagcactaaattgatccatggtggtgtgagatatctgcagaaggccatcatgaagttggatattgagcagtataggatggtaaaagaagcccttcatgagcgtgccaacctgctagaaattgctccccatttatcagctccattgcctataatgcttccagtttacaagtggtggcagttaccttactactgggtaggaatcaagctgtatgatttggttgcaggaagcaattgcctaaaaagcagttatgtcctcagcaaatcaagagcccttgaacatttcccaatgctccagaaggacaaactggtaggagcaattgtctactatgacggacaacataacgatgcacggatgaaccttgccattgctctgactgctgccaggtatggggctgccacagccaattacatggaggtagtgagcttgctcaagaagacagacccccagacagggaaagtgcatgtgagcggcgcacggtgcaaggatgtcctcacagggcaggaatttgacgtgagagccaaatgtgttatcaatgccacgggacctttcacggactctgtgcgcaaaatggatgataaagacgcagcagctatctgccagccaagtgctggtgtccatattgtgatgcctggttattacagcccagagagcatgggacttcttgacccagcgaccagtgatgggcgagttattttcttcttaccctggcaaaagatgacgatcgctggcactactgatactccaactgatgttacacaccatccaattccttcagaagaagatatcaacttcattttgaatgaagtgcgtaattacctgagttgtgatgttgaagtgagaagaggggatgtcctggcagcatggagtggaatccgtcctcttgttacagaccccaaatctgcagatactcagtctatctcccgaaatcatgttgttgatatcagtgagagtggccttattactatagcaggtggaaagtggacaacttatcggtctatggcagaagataccataaatgctgctgtcaaaactcataatttaaaagcaggaccaagtagaacagttgggcttttccttcaagggggtaaagattggagccccacactctacattaggcttgtgcaggattatggacttgaaagcgaggtggcacagcatcttgccgccacctatggtgataaggcctttgaggtggccaaaatggcaagtgtgactggcaaaaggtggcctattgttggagtacatcttgtgtcagaatttccatatattgaagcagaggtgaaatatgggattaaggagtatgcctgcactgctgtggatatgatttcacgtcgtactcgcctggcctttctaaatgtccaggcagcagaggaagccctacccaggattgttgaactgatgggcagggaactgaattgggatgattataagaagcaggaacaacttgaaacagccaggaagtttctatattatgaaatgggctataaatctcgatcagaacagttaacagatcgctctgaaattagcctactgccttcagacattgacaggtataagaagagatttcataagtttgatgcagaccagaaaggctttattaccattgttgatgttcagcgtgtattagagagtatcaatgtccaaatggatgaaaatacactccatgaaattctaaatgaagttgatttgaataaaaatggacaggttgaactcaatgaatttttgcagctgatgagtgctattcaaaaaggaagggtatctggaagccggcttgctatactaatgaaaactgcagaagagaacctcgacagaagagttccaattccagtggaccgtagttgtggaggattgtgagtctgggcagtaaatccacagccaacaaacatagaaacgacaaatcaccatgtaacaaccagagatgactgaaaccactctgaaataatgaatgtggatagctgccttttttaacactagaaaacattccaaaactttaaggtgttggtgtatttgccagctttatttgctgtactttatttgtatttgccattcagtctagcttttaagtatatttttttctttttctcattttcaatgcacattagttttgcatctgttttgtgacctgttagatgtgacacattctctttttgtttattcccttattc

SEQ ID NO: 1633 - DNA, 528 bp, Homo sapiens
cgccagggagctgtgaggcagtgctgtgtggttcctgccgtccggactctttttcctctactgagattcatctgtgtgaaatatgagttggcgaggaagatcgacctattattggcctagaccaaggcgctatgtacagcctcctgaaatgattgggcctatgcggcccgagcagttcagtgatgaagtggaaccagcaacacctgaagaaggggaaccagcaactcaacgtcaggatcctgcagctgctcaggagggagaggatgagggagcatctgcaggtcaagggccgaagcctgaagctgatagccaggaacagggtcacccacagactgggtgtgagtgtgaagatggtcctgatgggcaggagatggacccgccaaatccagaggaggtgaaaacgcctgaagaaggtgaaaagcaatcacagtgttaaaagaaggcacgttgaaatgatgcaggctgctcctatgttggaaatttgttcattaaaattctcccaataaagctttacagccttctgcaaaa

SEQ ID NO: 1634 - DNA, 2583 bp, Homo sapiens
gttcccacttcctcccgccccaggaaacctgccatggcctcctggtgagctgtcctcatccactgctcgctgcctctccagatcttcagttgcttcaggccactttgaatgtatatgagccggtcgtaggggatatcgatggcttagcttgggctcagaggcctgaaaatcgcccccaccaatcacctgtttcccccaatctaccctcctgaaggtcactgacaaagacttcattgtctcctaggagaggctgccatatatcagggctgacgtaattccatcttaatatcagttacattataaaaatttacctcgtgcctgaggccccagagcccaagggtgcaaagcagtaattagtcaaagttcaacttcccctcccactctgggctcaggctgtccctgagggcctgtgttttgagtctctttccagaaccttggtgtgaacttaggtcttggcgtcgggatcccttttcgtcacactcaggtgacctacaggctccgctcgacactgcaaggcttagaccagttcggtccaacagagaaagcaggcaaccaccatgtcatttgaaaacagtttcatcgggatataattcgcaacccatacagtgaatccatttaagatactctgacccatggatcccctgggtgcagccaagccacaatggccatggcgccgctgtctggccgcactgctatttcagctgctggtggctgtgtgtttcttctcctacctgcgtgtgtcccgagacgatgccactggatcccctagggctcccagtgggtcctcccgacaggacaccactcccacccgccccaccctcctgatcctgctatggacatggcctttccacatccctgtggctctgtcccgctgttcagagatggtgcccggcacagccgactgccacatcactgccgaccgcaaggtgtacccacaggcagacacggtcatcgtgcaccactgggatatcatgtccaaccctaagtcacgcctcccaccttccccgaggccgcaggggcagcgctggatctggttcaacttggagccaccccctaactgccagcacctggaagccctggacagatacttcaatctcaccatgtcctaccgcagcgactccgacatcttcacgccctacggctggctggagccgtggtccggccagcctgcccacccaccgctcaacctctcggccaagaccgagctggtggcctgggcggtgtccaactggaagccggactcagccagggtgcgctactaccagagcctgcaggctcatctcaaggtggacgtgtacggacgctcccacaagcccctgcccaaggggaccatgatggagacgctgtcccggtacaagttctacctggccttcgagaactccttgcaccccgactacatcaccgagaagctgtggaggaacgccctggaggcctgggccgtgcccgtggtgctgggccccagcagaagcaactacgagaggttcctgccacccgacgccttcatccacgtggacgacttccagagccccaaggacctggcccggtacctgcaggagctggacaaggaccacgcccgctacctgagctactttcgctggcgggagacgctgcggcctcgctccttcagctgggcactggatttctgcaaggcctgctggaaactgcagcaggaatccaggtaccagacggtgcgcagcatagcggcttggttcacctgagaggccggcatggtgcctgggctgccgggaacctcatctgcctggggcctcacctgctggagtcctttgtggccaaccctctctcttacctgggacctcacacgctgggcttcacggctgccaggagcctctcccctccagaagacttgcctgctagggacctcgcctgctggggacctcgcctgttggggacctcacctgctggggacctcacctgctggggaccttggctgctggaggctgcacctactgaggatgtcggcggtcggggactttacctgctgggacctgctcccagagaccttgccacactgaatctcacctgctggggacctcaccctggagggccctgggccctggggaactggcttacttggggccccacccgggagtgatggttctggctgatttgtttgtgatgttgttagccgcctgtgaggggtgcagagagatcatcacggcacggtttccagatgtaatactgcaaggaaaaatgatgacgtgtctcctcactctagaggggttggtcccatgggttaagagctcaccccaggttctcacctcaggggttaagagctcagagttcagacaggtccaagttcaagcccaggaccaccacttatagggtacaggtgggatcgactgtaaatgaggacttctggaacattccaaatattctggggttgagggaaattgctgctgtctacaaaatgccaagggtggacaggcgctgtggctcacgcctgtaattccagcactttgggaggctgaggtaggaggattgattgaggccaagagttaaagaccagcctggtcaatatagcaagaccacgtctctaaataaaaaataataggccggccagca

SEQ ID NO: 1635 - DNA, 3076 bp, Homo sapiens
gaattcaaaatgtcttcagttgtaaatcttaccattattttacgtacctctaagaaataaaagtgcttctaattaaaatatgatgtcattaattatgaaatacttcttgataacagaagttttaaaatagccatcttagaatcagtgaaatatggtaatgtattattttcctcctttgagttaggtcttgtgcttttttttcctggccactaaatttcacaatttccaaaaagcaaaataaacatattctgaatatttttgctgtgaaacacttgacagcagagctttccaccatgaaaagaagcttcatgagtcacacattacatctttgggttgattgaatgccactgaaacattctagtagcctggagaagttgacctacctgtggagatgcctgccattaaatggcatcctgatggcttaatacacatcactcttctgtgaagggttttaattttcaacacagcttactctgtagcatcatgtttacattgtatgtataaagattatacaaaggtgcaattgtgtatttcttccttaaaatgtatcagtataggatttagaatctccatgttgaaactctaaatgcatagaaataaaaataataaaaaatttttcattttggcttttcagcctagtattaaaactgataaaagcaaagccatgcacaaaactacctccctagagaaaggctagtcccttttcttccccattcatttcattatgaacatagtagaaaacagcatattcttatcaaatttgatgaaaagcgccaacacgtttgaactgaaatacgacttgtcatgtgaactgtaccgaatgtctacgtattccacttttcctgctggggttcctgtctcagaaaggagtcttgctcgtgctggtttctattacactggtgtgaatgacaaggtcaaatgcttctgttgtggcctgatgctggataactggaaaagaggagacagtcctactgaaaagcataaaaagttgtatcctagctgcagattcgttcagagtctaaattccgttaacaacttggaagctacctctcagcctacttttccttcttcagtaacaaattccacacactcattacttccgggtacagaaaacagtggatatttccgtggctcttattcaaactctccatcaaatcctgtaaactccagagcaaatcaagatttttctgccttgatgagaagttcctaccactgtgcaatgaataacgaaaatgccagattacttacttttcagacatggccattgacttttctgtcgccaacagatctggcaaaagcaggcttttactacataggacctggagacagagtggcttgctttgcctgtggtggaaaattgagcaattgggaaccgaaggataatgctatgtcagaacacctgagacattttcccaaatgcccatttatagaaaatcagcttcaagacacttcaagatacacagtttctaatctgagcatgcagacacatgcagcccgctttaaaacattctttaactggccctctagtgttctagttaatcctgagcagcttgcaagtgcgggtttttattatgtgggtaacagtgatgatgtcaaatgcttttgctgtgatggtggactcaggtgttgggaatctggagatgatccatgggttcaacatgccaagtggtttccaaggtgtgagtacttgataagaattaaaggacaggagttcatccgtcaagttcaagccagttaccctcatctacttgaacagctgctatccacatcagacagcccaggagatgaaaatgcagagtcatcaattatccattttgaacctggagaagaccattcagaagatgcaatcatgatgaatactcctgtgattaatgctgccgtggaaatgggctttagtagaagcctggtaaaacagacagttcaaagaaaaatcctagcaactggagagaattatagactagtcaatgatcttgtgttagacttactcaatgcagaagatgaaataagggaagaggagagagaaagagcaactgaggaaaaagaatcaaatgatttattattaatccggaagaatagaatggcactttttcaacatttgacttgtgtaattccaatcctggatagtctactaactgccggaattattaatgaacaagaacatgatgttattaaacagaagacacagacgtctttacaagcaagagaactgattgatacgattttagtaaaaggaaatattgcagccactgtattcagaaactctctgcaagaagctgaagctgtgttatatgagcatttatttgtgcaacaggacataaaatatattcccacagaagatgtttcagatctaccagtggaagaacaattgcggagactacaagaagaaagaacatgtaaagtgtgtatggacaaagaagtgtccatagtgtttattccttgtggtcatctagtagtatgcaaagattgtgctccttctttaagaaagtgtcctatttgtaggagtacaatcaagggtacagttcgtacatttctttcatgaagaagaaccaaaacatcatctaaactttagaattaatttattaaatgtattataactttaacttttatcctaatttggtttccttaaaatttttatttatttacaactcaaaaaacattgttttgtgtaacatatttatatatgtatctaaaccatatgaacatatattttttagaaactaagagaatgataggcttttgttcttatgaacgaaaaagaggtagcactacaaacacaatattcaatcaaaatttcagcattattgaaattgtaagtgaagtaaaacttaagatatttgagttaacctttaagaattttaaatattttggcattgtactaatacctggttttttttttgttttgtttttttgtacagacagggcagcatactgagaccctgcctttaaaaacaaacagaacaaaaacaaaacaccagggacacatttctctgtcttttttgatcagtgtcctatacatcgaaggtgtgcatatatgttgaatgacattttagggacatggtgtttttataaagaattc

SEQ ID NO: 1636 - DNA, 14796 bp, Homo sapiens; identical to SEQ ID NO: 973

SEQ ID NO: 1637 - DNA, 389 bp, Homo sapiens
catttttctctggaatatattggccttctacagctattactgaattatagaaactggtttatttctggcagaaagctgcagtgccacctgagttccaaattttaccattctttgtaaacagttggatggattatgataaagaagatgctaccaatgaaatagaaaaccaacgagatgagaagactgatcctcatgtactcagaggcacttccctcctaagtcaaagaccatcctcactgactatgtgccaacgcctcgtttcaggcttgtgactcaacaaagggcttttccattgatagaagcagtttgggatttgtagttgcgacttcttccgatagttacctgcacgtccattgctggcaactgacttgtcattaaaacctggctct

SEQ ID NO: 1638 - DNA, 448 bp, Homo sapiens
cagcaacatgaagttggcagccttcctcctcctgtgatcctcatcatcttcagcctagaggtacaagagcttcaggctgcaggagaccggcttttgggtacctgcgtcgagctctgcacaggtgactgggactgcaaccccggagaccactgtgtcagcaatgggtgtggccatgagtgtgttgcagggtaaggacaggtaaaaacaccaggccctccctgctttctgaaacgttgttcagtctagatgaagagttatcttaaggatcatctttccctaagatcgtcatcccttcctggagttcctatcttccaagatgtgactgtctggagttccttgactaggaagatggatgaaaacagcaagcctgtggatggagactacaggggatatgggaggcagggaagaggggttgtttcttttaataaatcatcattgttaaaaagca

SEQ ID NO: 1639 - DNA, 3212 bp, Homo sapiens
gaattcccgctcggcccgcgacctgccccgagccctctccatggaggcagcccgcccctccggctcctggaacggagccctctgccggctgctcctgctgaccctcgcgatcttaatatttgccagtgatgcctgcaaaaatgtgacattacatgttccctccaaactagatgccgagaaacttgttggtagagttaacctgaaagagtgctttacagctgcaaatctaattcattcaagtgatcctgacttccaaattttggaggatggttcagtctatacaacaaatactattctattgtcctcggagaagagaagttttaccatattactttccaacactgagaaccaagaaaagaagaaaatatttgtctttttggagcatcaaacaaaggtcctaaagaaaagacatactaaagaaaaagttctaaggcgcgccaagagaagatgggctccaattccttgttcgatgctagaaaactccttgggtccttttccacttttccttcaacaggttcaatctgacacggcccaaaactataccatatactattccataagaggtcctggagttgaccaagaacctcggaatttattttatgtggagagagacactggaaacttgtattgtactcgtcctgtagatcgtgagcagtatgaatcttttgagataattgcctttgcaacaactccagatgggtatactccagaacttccactgcccctaataatcaaaatagaggatgaaaatgataactacccaatttttacagaagaaacttatacttttacaatttttgaaaattgcagagtgggcactactgtgggacaagtgtgtgctactgacaaagatgagcctgacacgatgcacacacgcctgaagtactccatcattgggcaggtgccaccatcacccaccctattttctatgcatccaactacaggcgtgatcaccacaacatcatctcagctagacagagagttaattgacaagtaccagttgaaaataaaagtacaagacatggatggtcagtattttggtctacagacaacttcaacttgtatcattaacattgatgatgtaaatgaccacttgccaacatttactcgtacttcttatgtgacatcagtggaagaaaatacagttgatgtggaaatcttacgagttactgttgaggataaggacttagtgaatactgctaactggagagctaattataccattttaaagggcaatgaaaatggcaattttaaaattgtaacagatgccaaaaccaatgaaggagttctttgtgtagttaagcctttgaattatgaagaaaagcaacagatgatcttgcaaattggtgtagttaatgaagctccattttccagagaggctagtccaagatcagccatgagcacagcaacagttactgttaatgtagaagatcaggatgagggccctgagtgtaaccctccaatacagactgttcgcatgaaagaaaatgcagaagtgggaacaacaagcaatggatataaagcatatgacccagaaacaagaagtagcagtggcataaggtataagaaattaactgatccaacagggtgggtcaccattgatgaaaatacaggatcaatcaaagttttcagaagcctggatagagaggcagagaccatcaaaaatggcatatataatattacagtccttgcatcagaccaaggagggagaacatgtacggggacactgggcattatacttcaagacgtgaatgataacagcccattcatacctaaaaagacagtgatcatctgcaaacccaccatgtcatctgcggagattgttgcggttgatcctgatgagcctatccatggcccaccctttgactttagtctggagagttctacttcagaagtacagagaatgtggagactgaaagcaattaatgatacagcagcacgtctttcctatcagaatgatcctccatttggctcatatgtagtacctataacagtgagagatagacttggcatgtctagtgtcacttcattggatgttacactgtgtgactgcattaccgaaaatgactgcacacatcgtgtagatccaaggattggcggtggaggagtacaacttggaaagtgggccatccttgcaatattgttgggcatagcattgctcttttgcatcctgtttacgctggtctgtggggcttctgggacgtctaaacaaccaaaagtaattcctgatgatttagcccagcagaacctaattgtatcaaacacagaagctcctggagatgacaaagtgtattctgcgaatggcttcacaacccaaactgtgggcgcttctgctcagggagtttgtggcaccgtgggatcaggaatcaaaaacggaggtcaggagaccatcgaaatggtgaaaggaggacaccagacctcggaatcctgccggggggctggccaccatcacaccctggactcctgcaggggaggacacacggaggtggacaactgcagatacacttactcggagtggcacagttttactcagccccgtcttggtgaagaatccattagaggacacactctgattaaaaattaaacaatgaaagaaagtgtatctgtgtaatcaagatgaaaatcacaagcatgcccaagactatgtcctgacatataactatgaaggaagaggatcggtggctgggtctgtaggttgttgcagtgaacgacaagaagaagatgggcttgaatttttggataatttggagcccaaatttaggacactagcagaagcatgcatgaagagatgagtgtgttctaataagtctctgaaagccagtggctttatgacttttaaaaaaaattacaaaccaagaattttttaaagcagaagatgctatttgtgggggtttttctctcattatttggatggaatctctttggtcaaatgcacatttacagagagacactataaacaagtacacaaatttttcaatttttacatatttttaaattacttatcttctatccaaggaggtctacagagaaattaaagtctgccttatttgttacatttgggtataatgacaacagccaatttatagtgcaataaaatgtaattaattcaagtccttattatagactatttgaagcacaacctaatggaaaattgtagagaccttgctttaacattatctccagttaattaagtgttcatgtggtgggaattc

SEQ ID NO: 1640 - DNA, 430 bp, Homo sapiens
  misc_feature: n=a,t,g or c
gttgcaaccttataatttctgctttaatggcaatcaagtttaaaaaatgtacaattccacttatccatactattcctttataaaaggcagatttcaggtaagcttctaaatgcatgcgtaatgtagaggctaatattttctggcagtccttggttcctgaaatttgaacttcatatgtgttttaaacttttgtcaaaatagtcatgaaagatatgttatttttgcataatgaggtaatatatcaggggcgggcactcataagacagtataaatccacttgtctaaacttgcatgaggctgtgtgcattgtaaaatgccataaagagttttgggtcagtgaatatttngctgaaggaataacacttacatttaactgagcacttttctgtaataaataccaaagtaggtttttgtagctgtaaactgtgta

SEQ ID NO: 1641 - DNA, 403 bp, Homo sapiens
ttttttttttcaaagaaacactagcaatttattgattttctctatttccaaaaaaagcaaatacattagtgtatcacacaaggaaactgggcctggccggcacaaggttcctctacaaacatgaagcaaggggaaggtgggctacagggaagctccaagatccctcacagcagcccccggttcccttccctgcccaccccagccgcagtcttggtcctgccagccagttcagccagattccaaggtggacatgcagacagcaacactgcctcttgggtccccaggaggagtgtggagtcagggctgctagtgtggtccccactgcagaggtggctggtggccaatgactggatttgtcattggccgctagcacaggagatcccagggcagagtctgtgtcctt

SEQ ID NO: 1642 - DNA, 348 bp, Homo sapiens
  misc_feature: n=a,t,g or c
aagattcagaagaaccacagaagttttattttaaccatgtttacaaaaaaaagtaatccatacatcaaaattggggtttccttggttttaatactttaaaatgacacaatccaatcgaattcatgcancacttccagagatacagtgcaactggaaatatttttgccattgcagtggacatttctaaaaagcaaatgcctatggatgctcctgagccttcaaaataaaaagaaaagaaacaggcaccacagttctctaaggatggctgagtttcgcacattgtggaaaaacaacacaaatagccttcaagagtttcttaagcatcattaacattggatttcacctctc

SEQ ID NO: 1643 - DNA, 456 bp, Homo sapiens; identical to SEQ ID NO: 978
  misc_feature: n=a,t,g or c

SEQ ID NO: 1644 - DNA, 261 bp, Homo sapiens; identical to SEQ ID NO: 5

SEQ ID NO: 1645 - DNA, 652 bp, Homo sapiens; identical to SEQ ID NO: 9
  misc_feature: n=a,t,g or c

SEQ ID NO: 1646 - DNA, 376 bp, Homo sapiens; identical to SEQ ID NO: 982

SEQ ID NO: 1647 - DNA, 449 bp, Homo sapiens
ttttgaggatgcattgatgtattgatttgcctgggaacaatggcctatagttcagcctgagaattctcataaagttaagaaggcataaaaatgccccccccgagactcgtcaggagtattgactctcctacagtttaatttgctgcttttgtggtttctgtgatgtcatcccacatgtgtaagctggaaaaatccacgctgtgaagtgtaacctcctgtgtgtatttccacaatggagaatgttaggcttcgtttccctcggttgctacacatctgattacatgtgtcaggaaaacaaacttaaaaaatttcaggagacaaacctttcagcggaattgcctggaacccatgaagtgaggtcatagaacctacaactataataagctgtaggaagaaaagtagcctctgggctactttggtgtctagtcacattgactttccaggtgatg

SEQ ID NO: 1648 - DNA, 465 bp, Homo sapiens
  misc_feature: n=a,t,g or c
tttttttttttttttttctaaatgaagtgcttttaattttcagaccaaacatttttaatataaaaacattttgataatatacaaacagcaatcacaacagcatccacatggcagcaaggggaccagggcacagagngggggagcgggctggggagggacagttttcagggtcccagttgcttccctggcttgaaatcaccctggtcctagcagaggacaggttaaggctgccagaggangngggtccctgacctgggcccggagacagactgcccaggcaggccctctgataccatcttccaaccatggcagcctccaggaaaagccagatccatttaggagataacaggaaggtggctgtgattgacaggaaaggcaacatggttcctcagcatcctgctgatcacacctctgggaggggctgctggattgaagaggacctaagaatcttcctgggagcaggac

SEQ ID NO: 1649 - DNA, 367 bp, Homo sapiens
acattttagatttattttattatttttaatgaactatgtttaacattttacaaatcttcaggttgttacagttttcagcagtaaatatagtagtaacagcaataaatacaccgaaatatgagatttctctgaaagaatacaaaaaatagaaacacctggaaacaagaaggcaaaatgtcaattctagatctgaaatagaaattaatacagctgaattcctttacaatgctcgtacatgggaaaatgagaaactcatgcgccttataaatgaatgtgtgactttgagcttcacctttttaggaagttttgagggacatcatttgacccacagatctctaaaaccctataatacgtattgataccagag

SEQ ID NO: 1650 - DNA, 263 bp, Homo sapiens
tttttttttagacaaatgctcactttaatcacaattctaaattaattattttcacattaatatagatatttccataaaccaagaaaaactgagttattatacattttttaacagctaacatgatttgaaaattttttattaaaaattgatcagaagctagttgaaattctcaatgtaaatataaaatattcattacaattgtttttcaaagtaaattcagatctaagcttcctgaaaagctgtactatctcatatcataatag

SEQ ID NO: 1651 - DNA, 340 bp, Homo sapiens
ccaatgacctagtattttatttttagtgcctaggcaaggtctgagaaacaaatacattggacaaaacttgttggtcttcttcatccagaaattaagggactcagctcaggaacctctcctggagttgtggctctccccattggttgacattagatattgaattcatgtcatttcctagacaactgtggtgagggatggagttggggggctggagaggaagataatagcacaaattccagtattaggctggattcttctgaaggtgcctggcggttgagaatttagctatgggacccagtgtttcttttctgaaggatcccagtagtctcaaccaagaagc

SEQ ID NO: 1652 - DNA, 330 bp, Homo sapiens; identical to SEQ ID NO: 20

SEQ ID NO: 1653 - DNA, 383 bp, Homo sapiens
tcttgtgttatttttatttttcaatataaatagagacagggtcttgctatgttgcccaggctggtctcgaacacctggcctcgagcaatccttccacctcagcctcgggaagggctgagattacaggtgggagccactgcgcccagccagcagtttcagttacattatagagagagtttaatggcatttccacagttcaggaccagggaaagaaacacagaggctgcctggccctatgtgaaacttttgggggccgactccaggcctgagcctgctctgaggggatcagtcatgtccccgccttagtcccaggacctgagggagctctggattggtggcttggccagagccaggtggatggcagtgttgaggggctggtgctt

SEQ ID NO: 1654 - DNA, 323 bp, Homo sapiens
acctttatacaatttattgggtttaatattcataacaataactttttctactgaaatagcagtttgtgtttacctgtcgaaccccaatatgagaaatgtgtacaaaagcaacagactgtgatagaaaaaggtatgtgaaaaaattagcaaaccaaagcatgataaatggatgaagcactataaaattactttgctgtttacgtaactgtatctttaatctgtactgtgctaaacagcctatagccaagttttaaagagttacaggaacaactgctacacattcaaagaacaggcattcactgcagcctcctgatttgacctga

SEQ ID NO: 1655 - DNA, 491 bp, Homo sapiens
cagtagatgttgtctgtatttattttctacctttatgaaacaagaacctgctaacaggtaaatcgtaaagtaacatatttttgccctgatgccattagtcacaatgccatggggtaactgctatgtgatttcccatttgcaaggaagcatattaattcagtttctgctcaatatacaattaggttgtagggatatagatatctcatttgagttatctgagtttttcatctttatatctaaaaatctaatctgaaaatagtaaaacacatttaaaaccttagatgctactgtagtaaaagttatgtttataaacatttcagtatattccttcaacttcaagaatcttgaatttccttgctagaaggcttttttcctcaaagattccttttaggcttactttggtgttcaggatctccaattataaatgtagtctctcagcaccacattccgtaaagatgatttcccaagtaacgggtattggactaagttgc

SEQ ID NO: 1656 - DNA, 404 bp, Homo sapiens; identical to SEQ ID NO: 577

SEQ ID NO: 1657 - DNA, 313 bp, Homo sapiens
aagcagttaaatttttttaacttttattttttaaacaatgggctaaaaataaacagtattaaaaggttaagtttatataatacatatgtacacaattagtggtgttttcttttcagacaaaatactgaaacaaatattagtttaaaaacaaactatacagaagacttcataccgtaacaataaatgtatagtttcttcaaagggagaagagattcacatatctgataacaaaataaactagcaatctagttttctaatctactttatgaggctggattttttttttagaaaagctaatttaaaatatttagaa

SEQ ID NO: 1658 - DNA, 539 bp, Homo sapiens
tccaatttgataagtatttattgagcacctgctgtatgccaggcactgtgcttaatcctgagatccaacagcaaggaagaagagacactgtcgctgccccagtaggactccagccgagtaaggggaagggaagggaagggaaagacatgaataatcacacaaatgaatgtcaaatgatgcagcaaagggaaggcacatgatgcccaagtgtaaataaccagggggcctaacctgggggaggaggagccacgaaaggcttccctaaggagcatggataagtctaccaggcagagggaacagcgtgtgcaaaggccctgtggtaagtagaaaaattaggagagagacatacagccagtagagctggagtgcccagctggggttgggggtagggggagatagtacagagtggggttggagggggagcttgtacccagatgatgtagggcttttgagaacctattacatgtatgttgatccttactctgggcaatgtgaagctgttgaggggttttaagctgctgaatgacatggtctttttg

SEQ ID NO: 1659 - DNA, 523 bp, Homo sapiens; identical to SEQ ID NO: 991

SEQ ID NO: 1660 - DNA, 297 bp, Homo sapiens; identical to SEQ ID NO: 35

SEQ ID NO: 1661 - DNA, 379 bp, Homo sapiens; identical to SEQ ID NO: 37

SEQ ID NO: 1662 - DNA, 490 bp, Homo sapiens
  misc_feature: n=a,t,g or c
gatccaaatacacagaatcaagggaaggagttgcttcttctaagagtgatgcttaatcttttgggtcatggatgaattgaagatttgattaaagttacaataaaaagagnccccntcaaagcacgtacannctgtatcacgaacggtgcctggcctactttttccttttctacccaccccaccccaaccccccctgtctcagtgaaaacctggttgttactaaagtgaaactttaataaggatattgcctagggaagattagttgttttccttgtcattcaagttcattctggacctcttcctctgagctgttaatcagtgttgctaaacagacagggaaagacaagggagagaaaaatgctgattcattcttcagaacttttaaccnttttaaccnctaattcttctccttgagaagctattctttgattgtgaaagctttgttgttcagggnaatatggggtaataaaaatagctaaccatttttaaa

SEQ ID NO: 1663 - DNA, 195 bp, Homo sapiens
aatgatcaatcctgttgacagttttcccgtccatcttccagaagaactcactactcaaccaactgcctggtattcagctgtgactgtgaggatggataactatatttccttaagaaatagcaggaaggtatctcatccaagcagaaaataagaccaacagttgtccaggtctcagtggttctgcatttcttccta

SEQ ID NO: 1664 - DNA, 231 bp, Homo sapiens
  misc_feature: n=a,t,g or c
atgacaaaagcaaccaatntttattaaaaggcattaaaaacaaaacaaaacaaaacaaatacaattctgattaaaaagagacagacaccatgtccacagatgggaagaacttatattctaaagatgttaatttccccttcaatgcaattcttctcaaacttccaacagacattttgttcacagaactttgacaagctgattataaaatgtacctgaaaaagtaaatgtgca

SEQ ID NO: 1665 - DNA, 299 bp, Homo sapiens
cgtctggttgcaaatcagaaatatttaaaagttttaattcagaggcttccttcaccaaatgaatctaagaatctggtatgtgttgtaaaactgcatattgtgttgggcattcaggaaaaaaattctctgtacatttgaacttacactttgggaaattgctaaaggtagttttagtcattcacattccaaaccaagcacgaccaaaaacaagcttttaaaagttcaagcatatttgtgtattgggaaaagttaggaatgtaatatttagtgggtgggcatttttaaataatgtacttgtc

SEQ ID NO: 1666 - DNA, 310 bp, Homo sapiens
cggtttatttctgattatatttggagaggccaattttacatgatagcttcaaaccaaccattgtacattaaccaaattttacacaagccatttgaaaaaagatctaaaaatgtgcttagttattggtattatataacataacatttatcaagcaccaagagtgtgctgagagctgtacagaacaaacatagaaaagacagtccctgccttcaagaatacccattccttcaggatcttgcacataaaatttcaccttacattccacactcttttattcataaggcataaataaggaagtttgttgcatttc

SEQ ID NO: 1667 - DNA, 325 bp, Homo sapiens
gcatataccatcattgccactataatagagatagaagatacattaagaaaattcagtttgtatcaataaaacagatcaacacagaacaaggaaacaccatagatatttgtaaatgagatcttctcttttgctactgtgtatatatattcctttatatttatacaaactcacaacacatgacatttcatatttcatatgccactgagaagaggtgtcagtatacagaacataggaagaagaaaaaagcatgagaacatctgcttagttaggaatctgatgaggagagacgtgagagctattgttcctctctctgctcaggccctat

SEQ ID NO: 1668 - DNA, 495 bp, Homo sapiens
  misc_feature: n=a,t,g or c
tttttttaaatttaaaggagtttaattgagcaataaacagttcaagaattgggcagccttcccagccagagtaggctcggacactccagcgcagtcacacggtggaaggtttgcggacagaaaatggaagtgaggtacagaaacagctgggcttggctacagcttggcatttgccttatctgaacgtggtttgaacagttggctacatttgattggccaaaactcagtgattggcacaagtgtagtctgtttacacctccacttgtcacgatatacagacaaacctttaggccaaacttaaatatataaggaggcagctttaggctaaactttatttcaatacctgtattccaacactttgggaggccgaggcgggagggatcacttgagcctaggaagttagagattcagcccaagcaacatagtgagaccttgtctctgtggaaattaatttagccngggcttggtagcctgtaccngtagtcccagctactc

SEQ ID NO: 1669 - DNA, 441 bp, Homo sapiens
  misc_feature: n=a,t,g or c
tttttttttttttcttggttttgtaggcatttatttacatcatatttcaatacttcagaagcttaaacagtgtcaggggtatagcagttctgagaaacagttttacaagaagacataaactaaggggtacccatgagtgcgtctcatccttcctctcccaggccagagtaacaggtatgctgagatgctcttgcccttggccccggggtgctcacctccagcctcgagctgcctcacccagttagccagggggctgcacaggtgtttgcgtgtcctacatgtggcctgtcatgaagaaggtccgcatacgtggctctaggctgtgcagggcaagtcttcccaagggactnaaggaagtcaccctgaaatcctctccccatgagggacctcttcctaagtcagattttctcactgctcctngttccagntcctgttgccatt

SEQ ID NO: 1670 - DNA, 546 bp, Homo sapiens
  misc_feature: n=a,t,g or c
tttttttttttttttagtanctgacagttttattatactttaggggaagagatggctagtgacaaggagaattcaagattgttcaaatctttacagaagatttttgatactagcaaatgtttctcaaagataaactagnacaagttcagtatgggacaaaggaaacaaagnaaaagacattataatcagcatgtcctacggaaagnctacagtgattcaacatgtgctttaatttatactgcttagatcctttgagttcagatgtcttgagtttttgaggacagtaaaacaagtaaaactgggatgaaattaaagctatgtgggcaaattagtttcagttaaatcaggaatatctaatacaaagcttacaaactccaaaatagttcagccaatagagtaacttcccaaatnctgganttaanctttcatcacaaatttaaaaagggaataattcttctaggactcaactctggctnttaacaaggtgcaactccttcatattactttctgctcccnactatttcctgaatccagancttgcctgct

SEQ ID NO: 1671 - DNA, 327 bp, Homo sapiens; identical to SEQ ID NO: 995

SEQ ID NO: 1672 - DNA, 436 bp, Homo sapiens
agttgcataaaatctgtgtccaccctttctgccagctctagtttcctcttgtttcttttaaatgcagctaaactgaatcttgtggtcatgatgttaggagggcaagagggtattccatgatctactgcccatctgtaggctccttctccaactaaaaagcagggaggaattctgccagccgagagcttgcccttctgcccttcacataagagtctgttggcaaccgagactgggttcttgattccactcagtgctccaactgctccaaaatttaaggattttccatccattatgctgggcatcacactcaatttcacctaacagatttaggattaggatcccattcctggcatttgtaaaagggaggaatcctcacactaggaattcagggaaaaattgtttttggaaaaggggccatacacctacatgtaggggg

SEQ ID NO: 1673 - DNA, 214 bp, Homo sapiens
tactatgccctttattcaggagtgcaaaacacttaatcaaaaagagcatccttcacatatttaaagagtacattgaggcacagaaagtttgcccaaggcaagatagaaagtcgggtttatagacacaaaatgatctagaattcttcatgtccaattccttaaaatacaaactgtagactatttgtaatgcctccatcttattttatcaaacatt

SEQ ID NO: 1674 - DNA, 443 bp, Homo sapiens; identical to SEQ ID NO: 996
  misc_feature: n=a,t,g or c

SEQ ID NO: 1675 - DNA, 349 bp, Homo sapiens
  misc_feature: n=a,t,g or c
agcaccaagaacgcttcctncacacgatcttcaggatcgagcgggctgactgggagtgtctgcctcagtcccacgtggcacttggaaaaaacagagcgaggcccccccaagaggcagcgccacccggccgccgtgctcccccaacttggggacgtctggccttggacagctgggcccgtctctcaccacccacctcagaggcaaaaaaggattcacacccagatctctagaaaaatgatcaaaagcaggtttcttctcacagccaagcttcctgggacatgggcagttcattacatctngggaaaacgtaaatcattncttcaggctgtcaatactgtgtccctcacat

SEQ ID NO: 1676 - DNA, 333 bp, Homo sapiens
  misc_feature: n=a,t,g or c
tgacataagatttattgacttcacatcagcatttaagtattgttaaatttgtgtaacagtatttgggttgggaattggtacatttccagttgtacgaaagatagttgtattatgttaggcataattatgaccntattattgtcattatttgaagattatgtgtgagctcaggagatatctatggggttcaagttgacaaggggtgaccctgtgatgggttaatactgaggtgtncaacntggattgggattgnaaggcctggcaaaggtatttgatccccggggttttgtnccctngaggggtttttgtnccaaaggggtttaacccttttga

SEQ ID NO: 1677 - DNA, 149 bp, Homo sapiens
gctttgaatttgcaacccactcttatcctattttacaaatgagaaaactgaggctcaaagccaacaaacaattggcttaaaatcccatgctaagtagcacagactggaccagaacttagatacaaacttgatttaagaagcctctgatc

SEQ ID NO: 1678 - DNA, 241 bp, Homo sapiens
gaaacaatctgggtattacaggaatctactttgtcaactgtaaatttatgaaatctaaatacagatcaagtatttctgatgaaaacgtatgaactgagatatgctgttaaatgtaaagtacacaggattttggaaatgtagtacaaaaagaatgtgaaaacccacaattttaaaatactgattacacactgatacaatattttagatacaatggggttaaataaaatatattaataaaaaa

SEQ ID NO: 1679 - DNA, 447 bp, Homo sapiens
  misc_feature: n=a,t,g or c
gatattggtaacatctgaaagactgcttaaagtcaaattgtgaagaacttataatgttggaaagattttatacttcattattacaaagtagtgtgattatcaaaagggagtggttcatacttaaaagtccaatgcaatattctagacaagagactcaagttgaagaagcatgaggaacagtaatcaaggtgcaaatataacttattttttagtttgtaaaatatgcaaagagattaaagactagataagccattcactattacagtttccctctttacggccttaaataggcactattagaaagtaataaaaataaattggcaatnaaaggtcnctctagaagcactgcctgaagactagcagccttggatattcccatcaccaacaaataagaacnctattcntttctgcnaattttcatcccnaacaccaattactggncaatct

SEQ ID NO: 1680 - DNA, 604 bp, Homo sapiens
  misc_feature: n=a,t,g or c
tgtccccggtgtcaccgagcgtgttgtgtgtccgtgcggcgcggcgctcgtgtggctccctcgcgcccaccacgctggcccccgggccccggctcgcccttcccaggcgccggctgcagcagagtttcagaacaagcttcctggaacccatgacccatgaagtcttgtcgacatttataccgtctgagggtagcagctcgaaagtagaagtggagtgttgccagggacggcagtatctctttgtgtgaccctggcggcttatgggacgttggcttcacgacctttgtgatacaccatgctgcgtgggacgatgacggcgtggagaggaatgaggcctgaggtcacactggcttgctcctcctaagccacagcaggctgctttgctgacttgaacgaggtccctcaggtcaacgtccagcctgggttccaacgtccagaagcccggaagcactgtgatcttgggctcgtggtggaaactccaangatgaatgtaaactgggcgcctgaatggaaaagaactgaatggctcgaatgatgctctgggtgtcctaataancaaggaacctcgtaatnatggccttaaaaacaaanttgggaangtaaa

SEQ ID NO: 1681 - DNA, 481 bp, Homo sapiens; identical to SEQ ID NO: 62
  misc_feature: n=a,t,g or c

SEQ ID NO: 1682 - DNA, 138 bp, Homo sapiens
aagtaacctacaaagagcaagataggagatctgcaaataagattttgagtacatagcaggggccagtagtcaccctttcacaatttcattcttggagttccttaacttctggacccagagatcattgaaaacagtgta

SEQ ID NO: 1683 - DNA, 458 bp, Homo sapiens
  misc_feature: n=a,t,g or c
ttttcttagagagcatatttctttattctatttttatcatgcaggaactgaatcagcaggcaggatactgctcttctccccaacctcccccatctaaaggagatgagattttgggacataggtacaaacatagtggaccataggtacaaacatagtggacagggaactcagtggtcttgtgggctacagcattaaccacagcatttgttagttactgccaagaagcctgtatctgtagggtaaaatcctcgctgaagtgggttgccaaaacaatcaatatcacgttgcctaagagcaggaagttctcagggtccacgtgcagcttgttacagtgcaggtcactcagtgtagcaaaggtgcctttgaggtcatccgtgagcataacagcttttccgaagnggattcagcaccttcttgccatgtgccttgactttggggttgnccattattggcacagt

SEQ ID NO: 1684 - DNA, 442 bp, Homo sapiens
ttttacaaaatccaaaataattttattcacattttcagatttttgcttccacaaggtgttcagcaaacatgctaaggcgacagaatgtctagttggtcacgacatgcaacgctgaccattcaactgatgacagcagtgaccacgcccacctgagctaccagccccacagcacaaagggggtttgcgggaacacaccaaaccacacagcaaccagcaacctgaggtaggtctctttacagtacaaaaacttctacgccagtgtgagacactgattagcaagagctgcttaaagttgcagactttgaggggagagagagagagagactgtgcgacgactgcggtgagaaaggaaaacagacccacgaaatcctgagccctgccactgaactgtggaggtgtgggaataggcaaatgaaaaagtgccacctcaaaaagcagcagt

SEQ ID NO: 1685 - DNA, 456 bp, Homo sapiens
tcgttttcaagcttttcgcctacattttagactaaccctgcttattcctgtgaatcaagcagtgatctcctgcagcttggaagaaaaattaagggatgggtaatataaaatctgaatcaatatattagttctgggcaattattctgcaaattctaccaggtaataaaagtgagtagggtgcccataacccagaggtttcttcgtttaggaaaataaaaccaaggaacttcatagacccccaaaggaacttctatatcttgacaggtaaaagtttagatggaaattatctaccacaccacacttatggaaatagctatactcactctattatttgcaataggattatacatggtagcaccttctaactgaaatattaaacagagagtttccattgctggtcatattttgcttaatcattatccttatagcagggataatagctactaatgaaaagga

SEQ ID NO: 1686 - DNA, 418 bp, Homo sapiens
  misc_feature: n=a,t,g or c
atacaatgatctaaatctaaaatctttcacaaggtgcaactttccagtgataaacaagaacaggaagtgaatcttgaatacaaccagacttcaagttcccttcactattaaagtatctcctttgctgtctgttacctgagtctcacttaaccagcgttaaacttccatcattctagcccaacagttataaatatctttatttctttttgaacaaaacatatttcctattagactgggaaattttgacacactcaaatgtttgaagtcccaagagggaaggacagctaaaataaaaggganttgaggcaggcaaagcaacctcaggaaaaggcaggaantggaaaacaggatggtttaaccctcttttaaaaccaaattttttacttaataggccctcnacccnaggcttttttccgaa

SEQ ID NO: 1687 - DNA, 320 bp, Homo sapiens
  misc_feature: n=a,t,g or c
ccaagttaatattgttttattacatctccccatatctgtaaatattactttacgcatccaatttttgcttattttaagcagccaagtttctttaaaagcaaagtaacttcttttaatagcaatactaaaactctgtttaaaacattgcaaaacaaaccccactgcattttagacagctgcttccttataaaagtangtaaaaaacattctgtatatttacataaaaaattctaaatcattcactgggggaaaaatgaaagnctttaaaaatatatttccttgncacactcaaataccataaatttcaccttacacatata

SEQ ID NO: 1688 - DNA, 369 bp, Homo sapiens
  misc_feature: n=a,t,g or c
aattttattgaattttgtgaaattttctgtccagattatatactcttaacttgaaaggacaataatctgtgcttatctgcttatatatctgaaatcacccaccataatcatatacaagcttagtatctggagaactacaaggttattttttataccacaagatctgctcctatttaatgtaggcttactaaaatcttctactgtctttatacagtcctgtatatagcagtttcatatataatgccagctgttcagtaggcaagcataggtcaatcattccccatcggtaatcactgtacccngggggaaccncctgttcccntctctcagggggntactagggccatctttttnccctggccgggggcc

SEQ ID NO: 1689 - DNA, 353 bp, Homo sapiens
  misc_feature: n=a,t,g or c
tttttttttttagagtatatggatgtttattgcactattttttcaacctctataattttgaaattttcacaataaaaagttggggacaaaatttttaaaataataataacagcacttattctctacctgggactgtactaaaggatttttgtgcatttcaaatttaatccttgaaacaacaatacaaggtagttataattattaccatagtttttcctgacaatgaaactaaggtacagggaagttaggtggttttcacaaagttacacggataattctatcaatgacaggtgagattcaaattgagtatatctaacttgggnatcccgtgttctggaataaccaaaagtata

SEQ ID NO: 1690 - DNA, 350 bp, Homo sapiens
  misc_feature: n=a,t,g or c
tttttttttttcagttaattgaattccagggagatttattcccaatgttattaataaattctaatgccacctataactttcaattgccagttaattaacttgcaatgggtgcattgtaaaaggcaaattaaatactttttcaggcaggggctggcaaatttaatgagctgatgtgtcccaagggagacggccgggctcacacatcccatcaaatactcctcccatcagcagatgagagtgtgatctgggtgagtgacaactggacctccgcatcctcatctgtaaaaagggatcacaaaacctgcctncaggggcccttcagatacctggggtttggatcctgtgttttt

SEQ ID NO: 1691 - DNA, 198 bp, Homo sapiens
  misc_feature: n=a,t,g or c
tttttttttttttttttgatcttttggaagcattttaatgctgaaaataaatacatttcccttttcaaactcactgatggctaaaatcttaattaattgtacaaatttagtaacctactaagaaacatgtgcatttttttttcctttcacaagngctgctgttacttgaaaagaatgcttctggaattaggaataact

SEQ ID NO: 1692 - DNA, 396 bp, Homo sapiens
  misc_feature: n=a,t,g or c
cgcattctgattttattttaaaaatgtccatatacctgcagaaaacatgagtgatacaatgaacacctatgtattcttcacctagctttaccagttataaataagttgtcacatttgttttatctattattattattactgttggctaaagattttgggaggaagctacctgtagcataacctttcagccctaagtgctgcgtgtttctcttgggcacaaggacatccttgtacataaccatagtaaagttatcaaattcaagaagtttaacattgggaacaaagattcacatttctcccattgttccaataatgtcctttgtaggccatttttnttttnctcccctgtgcagggntctgatccnggggtcacacattgtattcgtttttgnccat

SEQ ID NO: 1693 - DNA, 434 bp, Homo sapiens
  misc_feature: n=a,t,g or c
ttttttttctcagtttggaatgtcctagcctatccacctgccaaggagatctacttcttttttcctccatgcaatgcttaaatgtctcatctttcctaagcctctcttccagttaaaattaatgacaaagatttggggcacttgcctttattctattttttaatactgggtcttcctctcctactatgtaatctctctgagagcagacacaaaattgtgtacatttttgtcccctatgcatccccaccctgatgtctatcacaaagacctgtagtagggtattcatgtttcggcaaacataattatggatgtgtacaccatggaatattactctacatcacacaactctatggcaacgtcagncattacatcttcttaatggcaaagttttacttaatacttatctatttaattaaaactacattatttatact

SEQ ID NO: 1694 - DNA, 444 bp, Homo sapiens
  misc_feature: n=a,t,g or c
tttttttttactgttaaacaatcttttaatacctttggaattactctttataatttttatacttcaaattaagaaaaccgcccaatgttcaggcaactttggcattaacatttccaagaaagggacaaaaacaactattaatgcaacatcatgaagagattggggacaattgtgggtgtctataaagctctctttgaaaagctctttaaagcgaactcaggtaaatgggaaatgaaatctggactttttacttaggccaaataacaatgaggtttgaatataaaatgggaagnttcagggccctttctacctaaggatggaagggcatttagtttgctcaaattcaaactccaccaaatacttctgnatgggaaagtttgggcaacagnactgggacctgtgggggggttcaccaaccttttttggtccaagggtgatcnggtt

SEQ ID NO: 1695 - DNA, 292 bp, Homo sapiens
ttttttttttttattgttggaaactcaacttttattctgggttaagcctctagataaaatcttaagtctgccaaactattattccccccaccttttctttccccaactatcaagaccattctaggaagtacgtcactctaccaaaaatgattgagttgtgttgggcctggggaaaaagtcgggcaaaaggagcctttcttgtggctgctgatagttaggttcatccaccaccgcactttgagctcgactagagtcgccatggggtttcatctgtctttgtggccccacagtg

SEQ ID NO: 1696 - DNA, 464 bp, Homo sapiens
  misc_feature: n=a,t,g or c
tttttttttttttttaaaaaacaattccatttatttttgcatcatacaacataaaatccttagtaataaatttaacaaaggatatacaagacctctaccaaaactacaaaatgttgctgaggaaaattaaagatgacctaaataaatggagagatgtgccatgttcatgactagaactttcaaaactgttaaaatgtctccaaagtgatctacaaattcaacccaaccccaattacagtctcagcataatcatactcctttttatagtaattagcaagcctattctaaaattcataattgaaacacaaaagntctaaaatcttggggaaaacaacaaaattgggggattttacatttaacatcagggttttactaaaattccattccatgggttctcggctgggggccaattttgcccctcagcggggcatttgggcatttcnggggtacattttggggtgtca

SEQ ID NO: 1697 - DNA, 430 bp, Homo sapiens
  misc_feature: n=a,t,g or c
ttttttttttcagncacaggtagttttattgttatgtttcacctagntaggcaatttttaaaaatagtgtgtagaaatgaatagtttcaaactgagtaaatatagtagtataccatgtcataaaacaatcaaatcaaaagcaactgccaagctaataataagtcaaagaaatagtaattctggcttgtacagatatgtgcagtgttttcaaagctcttaacagttaaccactaacatgtatctccaaagcttaacttagnagttggaagatgaatttcacagtaatgtaattttaaccaccatttacattcactttaatatattactanggatgtttactcctatgtncacaatgggtgctttcccagtgttccacantttcacagtttccaatttgtacatatgtgattgcactaacnttggggacagt

SEQ ID NO: 1698 - DNA, 469 bp, Homo sapiens
  misc_feature: n=a,t,g or c
ttttttttaataattacttccagtttaatttatagactatataatttgtcatgaaacaaacagttttcattttgacataatttctgacaactcagtgacataaatatatccatgtgagctcctatnnnntttgacatgctcacttacctcacatcagttctgccgatagatttggtaagtggtgcttttagtttccttaatgcacccctcaggatttcatgcaaatgaaattattatgacaaatttttctatagccatttctaacacagggaactcataaagaaatcaaatgtctgcacttcactgtgaaaacactaaactctcaggccataatgaggactccacacattatcngaaaccccagggcataccaaaaggncagggtccccggggacagtctttgggngggggagggtcataatgttggatttgggccatnctgaatttcttgntcttgaacttggccgct

SEQ ID NO: 1699 - DNA, 366 bp, Homo sapiens
  misc_feature: n=a,t,g or c
tttttttttttcacaggtttacaagatttcttctggaaaataatcataaattcaaattatattataatttgcagtttacacaattttaaaagggaagaaagatgcctttctttttagcttcatttggacagtaagaacagccaccaacccccaggtgtggaaaagttgttggctgagtgacaatacttggtcacaacattgaaaagaagtatttacaccattctgggaagtaccaaatattaggaaaaaacaaacaaaaacgggaaacantccctagtaggcattccttgggcgtgcaaaggtcagcagggaaatgntttttccctttggacagtttttcatggataagtcttggggaggcctttc

SEQ ID NO: 1700 - DNA, 472 bp, Homo sapiens
  misc_feature: n=a,t,g or c
tttttttttgggaaatagaactctttatttaaatatcagtacagaacaataaattactaaaggaaacaatcattaatataaattttttcttattaaataatttaaaaattctctttcaggacacggaaagaatccccagaggtctgaagtctaacgtgattattttactgacaatatcatttgcaagaaagagatcatcattcaaaggaagtacttggattttccaaacaaaaagagaaggaaaggaaaatgatatatcttgtttagtcagccaggaactttaagtgcaggganttccatcagggtaggcaccaaggggaaatttgccattaattatgttagggtattaactgctgggtaaaatttgttgggccaaaaggggatccagggcagtggaatggggctttttggggcccctgggtgtcctcctggtctgctgggggnccctgggncttacacctngggccttggg

SEQ ID NO: 1701 - DNA, 182 bp, Homo sapiens
ttttttttttatgtagaaataatgtacttagtgatgcataagacaacagtccagattcagttttatttggttttatttcctacagtatagtgaggaataaaattggggttgatcaaggctttacagatttgagaagccttgaaaaccctacaaaaatatttagaatggatttcataagaaac

SEQ ID NO: 1702 - DNA, 275 bp, Homo sapiens
  misc_feature: n=a,t,g or c
ggctttagtacaattaccaagtgtaatcagttacagtaattctgtatgtatctcagcagtattattttccagcatggctttacattttaaagaacttaataactatagaataaacagatgcatgctatacgagttggaatgtattagagctgggttcccttttgtgtgtgtttgtgtcacgtgtttagtttatccntagtcatgaatactatgttgcctagatacagtggggaacaccgggaaagtgaaatgcagttttgttttctgggaggcaa

SEQ ID NO: 1703 - DNA, 361 bp, Homo sapiens
  misc_feature: n=a,t,g or c
caatcantntnactaaaaaattttattgaactggtcaattttctttgccaatattactgtattcttatttctagtaatagaagtgtgaaaaagcatcaaggaaacttaaattgcattctcatactgactgcatacaataattctgaaaacagcggaagttatatatatccctcataagtaaaacatgagtaacacaacaantgaaaaacgantaggagacanttcaaataatggcgacctgttattctcatctngttaagtactattattttctaacagggantttgctatttcaaatatattatctgaggatgtctatatatttatatttngaggtactatacaaatttggggccaatgg

SEQ ID NO: 1704 - DNA, 472 bp, Homo sapiens
  misc_feature: n=a,t,g or c
caaatttaacttgctattgagaaagtttaacaaattgtttaacctgaaagacaaatttcctggtaaacaaccatttaacatcccctgtgtctttgcctcaaatccattaccaacaaggcagtcatcctttcaaaatgcaaatctgattatatcacacttgactagtttaaaatttgtcaacccttcctattaattttatgttgaggagcaaacttcttaacatgacccatttatcatgtatcatccaaactgggacactctgagagtgaaaagagagtgattaatttttataccagtaaaccaggggcagcccctaggaaaagaggttaggtgtgggctatcccacccacaaggccctacctcttcaaattccttcacattctccctcactgtttcccctccaggntccctccagcagggcnttttgttaggggnaaaattaatttaggtggggacagtgggttatggcctt

SEQ ID NO: 1705 - DNA, 299 bp, Homo sapiens; identical to SEQ ID NO: 71
  misc_feature: n=a,t,g or c

SEQ ID NO: 1706 - DNA, 342 bp, Homo sapiens; identical to SEQ ID NO: 1005

SEQ ID NO: 1707 - DNA, 340 bp, Homo sapiens
ttggaccctgaaaatccaaaccactgttgctattacaaaatttttctttaccctagtatgcacccctgggccaagcacagatgcattaaaaatttgccaagagaaacaatgaagtcactgataatacaaagcatgagagtatcatgaaattcatgtctttgttttcttcctctagatacttaattatttctcattactgatcattttgtggttattggcagaggggcaaggaaactccaccactgtaaacatgtagagacacatgctcctcagtagaccagaagtctgcatatgatgggtctgttcacaaatccaatgtgaacaccacttcattaatcag

SEQ ID NO: 1708 - DNA, 277 bp, Homo sapiens
ttaagtatcaaagttaagtttaataaagtaagttccttccattttgtaatgtataaaataataccatttaaacaggcagaaactagctaatctgcatttatagagcatagttttttgggtgggaaaaaagcattctttcatcatttcacctttactagaagaaacagacttatgatggttcttactattatttttcaactttagaattattcattcagtagaagctgtatttcaagtacccaaccattctgtttttcactttcaatgtaatcttcaa

SEQ ID NO: 1709 - DNA, 505 bp, Homo sapiens; identical to SEQ ID NO: 1006
  misc_feature: n=a,t,g or c

SEQ ID NO: 1710 - DNA, 134 bp, Homo sapiens
  misc_feature: n=a,t,g or c
attgttggttttaatcagtatgcttggctttggcanttaaaaataaatgaaaagtaaactgcagacattaggaaccattcccccaggacgtacttaaagaagaacagacaaaaaataagaataggggagtgacg

SEQ ID NO: 1711 - DNA, 415 bp, Homo sapiens
  misc_feature: n=a,t,g or c
tttttcttctctccttcatttattcatttgttcaaaacactgtctagtaccaacattgtccaccgggcattgagaatacaatattgaagaagagtcactgcctgccctctggaaaaatcagagtatttgaaagantacacacaagtaaacaggcagctatggcaaagtgggtaaaagctgcaaaacagggaagtttcgccaagtntcagatgccaagaagtntcagatgccaagaagaaagggtgcatgacatagacttgggggggtcagtagtggtttctggaacgagtgacatttagactgaaactggaaggntntgagtaagggctaatcggaccaagntgaagagttacagaagcngaaggaacngtagggaccattgctcagaggcnaaaagaaagctttgattttttga

SEQ ID NO: 1712 - DNA, 357 bp, Homo sapiens
  misc_feature: n=a,t,g or c
atgctgctatgacagaatacccaagactgagtaatttataaagaaaagtaatttatttctacagtgccagggtctgggaaggtgctggtatctggtgagggctttcttgctgcatcattccatggcagaaagtgagagggtgagagagggacaagggaggggaactgaactcattcctttatcagtaacccactcctgcaataactaatccactcccacaataacaacattaatctattcatgagggcagagctntcatgacctagtcacttcttaaaggttctaccttaactccattgctttgggggattaaatttcaacatattaaacccttgggagggacacattccaaaccac

SEQ ID NO: 1713 - DNA, 421 bp, Homo sapiens
  misc_feature: n=a,t,g or c
atannaannngaaaagtgttctgtttattggtctggcttggtctcctgtgcgtctctcagaatgctgctctgcccttgtgggtcnaggggtcgcagtggnggtcacactggggcctgcctctgctgcccacctggaagtggcctcagtcagtcttcctgaaccctgtcagcctaaacttctggaagagggggatgaagccttggaggacgctgtggatacggtacactagtccgaagtagatgccaacggtttccaggggaggcgaaggtgagcaggccgaccccaagagacatgaaccagtctgcgtaatagtgataacacaccagcaangccccnatggcaaagcacaggangacgaaattggaaaaactcatcatctttctttatattcagtcttctttaacttangaggcctccant

SEQ ID NO: 1714 - DNA, 439 bp, Homo sapiens
  misc_feature: n=a,t,g or c
ttttttttttttttttatagaagtactctgatttttattgttatacaacatatatatataattgtttccccaaaatatgcacaattacatgtgtcaattttaaaaaatgaatgaagactataatgtaaaacctatagctgtaaaattcctagcacaatacagaagggtgaagcttcatgacaactggtcgtggcaataatttgggggacgtaacatcaacggatgagacaacaaaagcaagggaatacacatggtactgaatcagtgtatgaaaaatatcccaaacagacaaagcagaacatggaatagatatatngcacattgtagtattagtcacaaacatgttaccttggaagcaaatgtacccttaaggattgagttagattcagcaaacagggcacgtacaatcactggggatagcattcagccttaaaaataa

SEQ ID NO: 1715 - DNA, 471 bp, Homo sapiens
  misc_feature: n=a,t,g or c
tttactttataataaaacacttttattgctgcagaatgttaaactgcataacaggcaccagatggtcaagacgagggaaatatgagaaggcaaatgatgtgaggattagtatcttgagattcacctggtctggaattatgtcataggctactatgcatcagaatcacatggagggctttctaaaacagactgctcagcccacccccagggtttctgagttcataggttataagaggtaagttgaacaattccccagatgatgctgatgctcctggtccacaatgtgagaaccactaagttggagtactgactcatagagataaaattctttgaaagaaatgtactgttttaagatactgtaaaatgtggaggcagggcaaacgtttataaagggctgttatgtatgaaatgtgcctctgacccaaatccacggactttgcgaaaatcaccaaggagactttgcantaagtt

SEQ ID NO: 1716 - DNA, 279 bp, Homo sapiens
  misc_feature: n=a,t,g or c
ttttttttcagatttctagaatcctttaattgtctgcacccatagctgaagtaaaatacaatatcttattaaaaggcccgtattgaaagaagaatcagtaaactcttcttaagaagagtcagctgctcctgcgagtcagcgatcttcttaaatgcgtgctctgcttctggtatccttgagtcattgctttagcaggctgcttccttgaacttggctgtgagntgggggaatgtggttctcccttgagaaatgggttccagagagctcgaagatgagcag

SEQ ID NO: 1717 - DNA, 510 bp, Homo sapiens; identical to SEQ ID NO: 595
  misc_feature: n=a,t,g or c

SEQ ID NO: 1718 - DNA, 724 bp, Homo sapiens
  misc_feature: n=a,t,g or c
aagagagcgcaaagcagtttattctagcgagcaagggagtgagcgtccaggaaggagcaggtgtaacccggcggtcagtggagcctcagtgaggtgtgtcctgttttttcctgcaatcgccgcagaagacaccaatggtcgcgttcaccagctggatcccacacagtactatctccaggcaggaggcggccaccagcagcgagaagagcgtcacattccaggggaccacgcgagggggcgcctcgcaccgatcccatagagtgcggttgagcaagtaagctcccgcggtgtcttcgaagtggtagccccactcgccgttcattaagcatctgggtccatttcggagcccagctccagacaccgagaggcagtagatggcaccaagcaccccgaacgccgaggagaagaccgagcgcacatcctgcagcggtttccacagcacccagcaccacagcagcccttgccccctgcccgaacggctgcaatcctggacacagtaccattaggccccgccaatgaagccgccatgagccaacttgcaagttgaaatggttgtgttgtccaggaagtttcccattggtacnacaagaaggcgttgccacaattnaagacgangccaaggttttggggangccccaaaangggaattttccctcggcgnattttgctttagnaattcctaaggggngttaatcgaaaangcaancgttcgggnattttcgcc

SEQ ID NO: 1719 - DNA, 415 bp, Homo sapiens; identical to SEQ ID NO: 597
  misc_feature: n=a,t,g or c

SEQ ID NO: 1720 - DNA, 411 bp, Homo sapiens
  misc_feature: n=a,t,g or c
antcacctctgtcccccaggctggagcaaaataaataaataaaggtgcagctgtgggtcgaaggatggtgtggaagtttggggtagacatccaagactgcagtaatgctatgcccagggtatattttggggcaaaacccccaaaataccctggcaaagaaagaagattgtgtttcagttgcaatcatctaccctaatccctttctgagggcctctggactcgcttgggctcactgcccttgtctgatggggtaggatctcccagaggagaccagctaattatactttaatgaggtgacttacagacactggaaaaggagttggctggtacactccccatcatcatnagcagctctctncgaggatacagtctgtgaataaatggtaccagaacnctcttgagcctcgtgcc

SEQ ID NO: 1721 - DNA, 483 bp, Homo sapiens
  misc_feature: n=a,t,g or c
ttttttaccattataaacacgttgctttttattttactaagttctttacatatgctgtctcactgaataaaacaacaatcctgctaattagatggtattatcatcattctacagagaagactaaagagaggtttaagtggtctgcccatgtttacactagacactgtcagaacaaagcctcaaatgcagattttctaacaccaggtccagtcttacccataatacaccaaactgcacaccaaccaagttttcttaaggtccatggagcaattgaaaatatgtctaaaacatctgggggtatgtgcaatggggaataatgggtgttggattattttactagactttcaaaggaattcataattaaaaagcaagctaagaaccactgacctatactgtaagttacctgaaataaggnacttnttttgttttattcntgtttataccccagcattacctataatgcctagcgctactataaatgcc

SEQ ID NO: 1722 - DNA, 237 bp, Homo sapiens
actgttcaaacagcaatgtttagttgtacaacacataaagtctagcaacaattacaggaccagtttgagtgtctgtttgcttgttttcaattgggaaatttaactgtaatgtcaccgtaagattggctgggactggtaacatttaagaaacgggttgttcttgcatcccctaggcgtgggcctcttgctccatcaggacttggttgtagatgaatggcccacaagtcaccagccttt

SEQ ID NO: 1723 - DNA, 348 bp, Homo sapiens
aattgcagtcacgtttatttgcagtttctatacacactttctaggtaatcaaacttttctgatacattttttttgagaggggttcacaatgaaactgtcaccatttttactaaaaataaatacaagacttaaagtgttgcacagctctaaaatatacaaaggcttggattgaatgtaaacgttgaaaacatcttacaaaagaaaccatctttgcagcaatttaaaaagttcatatttacaaatattacaaaaatacaaaatggatgcaagtccataaaccattgtcgtttcggccagcatgaactggttctagtaccaaaatagttacactgtaaccttcttcatagt

SEQ ID NO: 1724 - DNA, 348 bp, Homo sapiens
caatgctggcgtgccattcattgaactttgacctaattaatcatctggaaacctgttacaatctttaattgatagcactgtggtaagttaatgtataagtttctaaatcaatcacaaaccaaacagcagcggttccttaaaccatgtttaaccagaagggaggggacataatctgattatgcatgacaagaaaacaaaccccatttgtagaataaaatactttaaatggtttaatattgtaaaccagcccccctcccacacacactttttaataatgggttaaacttttccctttctgtaaggccatagctggttttctgactagttgcctaaacatgtttctcatat

SEQ ID NO: 1725 - DNA, 476 bp, Homo sapiens
  misc_feature: n=a,t,g or c
atcgttgttcggacatttatttctattattattaacacatatttgatcaaaatgtaaaatgttatgaatattgataattattaaacatgaaagatgaaaatttattgggaatgtgtcccttaataagatggatatggctctcttttccaaattattcatcgaatccgaagaaccatatgacatggttggaatgattttatataatagaattcagcctcaattctatttctatnnnnncanttttttgtagcttataaaggctaaggaatcttgttcgtatgagtaaatcaatgggaatggaagcagtttcgttacagcaatgccatttcattctttgacctgatttacatggcaaaaattactcatttttgattatcagttattaactttataagggccnccttcaattttgttgaaagcagaaaattagntaccacattatttgcaaaaggggttttaggnccaaacagttccat

SEQ ID NO: 1726 - DNA, 287 bp, Homo sapiens; identical to SEQ ID NO: 1009

SEQ ID NO: 1727 - DNA, 478 bp, Homo sapiens
gcccgtgagttttttaccatgctgctctgaccagtttgagtggcaattaccaatagatttgttttctttattctatggagatgtttttaccactgacactgttttctgattatagtctgcttcatagaaaatagcctgcataatcaaacaaggagttactttgaaattaaagtatgcctggctattaaaaatgcagattttaggtgggtaaacatcaggtaggtctgggtgggtcatgttctaggcctagaaaaatacactattagacaagttctaaagaaggcaaggagataaaggcatcaggtggtaacttctaattgaatattatatgttgatcatacataatatatactatgcctggaaattatgactgaaaagcacctattcggttagtgctcctattcatgagaacatatctccaatactaaatgagataagcctgttctaaaatcttatagccagtattttaagaaacttg

SEQ ID NO: 1728 - DNA, 278 bp, Homo sapiens
ttttttttttttttttttcacattctcaatatgctttattcaacagaacaaaagaaggcaaagagagcagagaaagcagtgcaggaatgcagactgcatcagaaggtacatcacttgccattcagggacactgcaagagaagatcaggacaactgacttgtcagatgagaactcctgagtgtagctataatgggcaggatggttagcaattaaagagaggactcctcatctgcagctggacctagactgagtttcagttcttatggggatataggtca

SEQ ID NO: 1729 - DNA, 348 bp, Homo sapiens
  misc_feature: n=a,t,g or c
agctttttcattttattgatgttcttttaatatatgtatttaggattaaactagtgttcaagtactaataatccagcaattctgaattggggctttattttttaaaaaatacaagcacagttagggaacagagatgaaattcttgtcaaacataaaaatatgaattgaattgcttctttttagatggatctttaacattgacttgaccatatggacaatgtctgcacgcagagccacaacattcacctctttgcaagtgggcaatctgtgtgagcaccacatagccagtagctggatccacatagtttagctggccagccgcgcagcgggnccgtttgcancctccag

SEQ ID NO: 1730 - DNA, 392 bp, Homo sapiens
gaacaagttttgtctgtttatttaaaaacagaatatcattttatgtacaaatatgcacatatttacataaaatgtacatgttaggatcttagatcttcaggctccacattcgaagtcctaggctggctggggaacgaaggatgggagcctctcccttaggccagaaatccagcagatttcagactaagaagagtttgggtactaaatctaggtattctggctgagtgtatctgggtgggccagctaaaaataaacctcattgaactccagccccaacccagagaaacatccagaagagccttgaattagtgatccaaaacccagggggaaaggcgacattctcacccccagcacctccttcacctcacctcaactcctactctctcggtctc

SEQ ID NO: 1731 - DNA, 330 bp, Homo sapiens
  misc_feature: n=a,t,g or c
ttttttaagtagcataatgacctttattaatcactgcatctggtgtttgccaaatgggagagaaacaatactcaagcagccttttgttaaggggtaacaagttatctgaatgaagatacttcagcacatttaaattatatttaaattatatcaagatagtgctataaacatttaattccaagtagcattctcaataaaataactcattgcaaaccnaattgctctctagagaagattactgggcagtctgtttcagtaataacataaagcaagaatcgaatcctctcagtaattaggtaacagattaaattttatcaattatctactatc

SEQ ID NO: 1732 - DNA, 468 bp, Homo sapiens
  misc_feature: n=a,t,g or c
ttccatttgaaagcaaacatttattgggctcctgttacacattaggactggagatacagtattaaaacaagtacctgttcatgaaacttacattctaatgggaaaagatcattgattaatatacaacaggtagtgataagtgctatgaaaataatgcacttataaaaagaataaagaatgacagcagatggggtatgaatgtgggggcatatggcctattttagaaagcatagtcagggaatgtgtctctcatcagatgatatttgaggagagacctgcaggaagtgagccagccagccatgaggttgtgctattggacaagagttgcaggaagaaggcagtgggtgtgctggtgctggctttgcattttgttcctgatggcatgcatctcttccccaaactcctggtattccagtgaaaggccaatttagtgggccccaaaaatagccctnggatgaggngtttttt

SEQ ID NO: 1733 - DNA, 424 bp, Homo sapiens
  misc_feature: n=a,t,g or c
caaaagaaaaattctattctttttattcagtttttaaacataccagcgagaatcaaaattgtcaaattttccaatggcaatttctccacaccagaaagtggttgtgactctcaaagaagtaacaatttggggttttcctgccttcaaaatgttatcaaatcctgtatttctcacaggcttttgaaacacacagaaagtaagaaatattccaatgaatgaaacgtaccaaatgtcagtaatacgcaagacacattcctttggggaaatggctgttaggaaaaaaatccagtctgtacatgcaaaataagcaaggaaattcagtctttctttcttcttcttcttgaaaaatccgttactcctaanatatcattccaccaaaattggaagtgaaagactaaaagggtcaggaaaggggaaggagagg

SEQ ID NO: 1734 - DNA, 441 bp, Homo sapiens; identical to SEQ ID NO: 603
  misc_feature: n=a,t,g or c

SEQ ID NO: 1735 - DNA, 565 bp, Homo sapiens
  misc_feature: n=a,t,g or c
ttcaatcaacaaggctttatttacactccttaataaattcaggaaacaatttgatgtcatgtgcagccgccaaaaatagacaatgtagcacatcccactgtctggagacagctacttgtctatgctttaatagtaacccacaggcagccaagtagggttccatatatccaggtgttcacatacagcttccttccagcatcggtcataagcatgcctgcagtcaaaccacttaagatcaacattgatggtaaagtcttcttgatacttaatttggaattaacacttttcccaggaaatctttttcttctttctggatctggtgactcataaaattctataagcatcttatctttgatttcgaaacgttcatgcagccatcttctcatatgttcttngttcttctgggacatcttttttgtcgatacgatcaatgtgaatatgaatttttggacattctttgcagagaaattccgtcatggtcggtgactctccttcgctgcctccatcgtctttcccttcataaccaccgtaacatcataaattgcatctaaataattcctcatgg

SEQ ID NO: 1736 - DNA, 246 bp, Homo sapiens
  misc_feature: n=a,t,g or c
gcaagataaggcactttgtttttaattctatcagtctctttagaatgaacgaaggtctgggtcctctggaaatctcaagtggtgctgcctgcanttntaaaaggctgagcacaaacccatcagagagccacagtcctaagtagactcctcggtgcgctctgcccacctgtccatgtgcattcagatttctcattaaattttccacagcatgaccagtggggatgacctgggtggccgttgtntcca

SEQ ID NO: 1737 - DNA, 389 bp, Homo sapiens
  misc_feature: n=a,t,g or c
ttaattaataggagatttatttatgcaagaatagtcatccttgccgaacttagtaggagatgttaaattttctgtccagttttccttcctggataagtctttcctttctgtccctgtctgttttgaaaacataataccagaagatgaggggcccaaaccctgccacagctcctaaaagtgagttcttgggagtgggcctgaaattaggataaatatttgctgatcttgcataggtccagcgaatcaaggcaggatcctcgatgtgcgacacgcgtttgggggtcgttgtactgaagcagatactcccgtttaagccgggcccttatgctcaagcgctcgacctncgcccttctggtctccggagacacgtcatactcggcaggggtcga

SEQ ID NO: 1738 - DNA, 538 bp, Homo sapiens
  misc_feature: n=a,t,g or c
ttgctggcccagcttctacattttatttataaaaacaaccagtgagtctgctagagggtttgttttccataagcgccccagatacagttcacttcgtttcacgaagttctttcttcagatgtcacctcaccagcctatagggaagggccaccaaagtatcccatccctctcctccctgttatcctgccctgctcttcttcataggtattataattcgccatttgtctgtgtgtgtatttagtgtgtatccctctccacacaagaatgatgttaggtgcacagtaggtgaccagtgaagaattgttatgaatgaattactcagggcctggtttaaccgggtgccattctgaaagcagtccacatctcctcaccctacccggtccctcactttagtgaggaaggagtcttgagatgtactgagcctccccgatntctccctggcctacagttttgggctcaacatggcacaanggtgaangggattaggacattctattcacctggtaggaccatcntgtcangggagaaattttgggct

SEQ ID NO: 1739 - DNA, 441 bp, Homo sapiens
  misc_feature: n=a,t,g or c
tttcatcaaaacttgggacatacatcaacttcatttcttttcagtaccttaaaaaaaaaacatcagttctgggacataacaaagaaatactaggagaaatggtatctggacaggaacagaaatgtccacaactgcgagggattttcttttacactggccacagagcgtttattgacaccaccactcctgaaaattgggatttcttattaggttcccctaaaagttcccatgttgattacatgtaaatagtcacatatatacaatgaaggcagtttcttcagaggcaaccagggtttatagtgctaggtaaatgtcatctcttttgtgctacngactcattgtcaaacgtctctgcactgttttcagcctctccacgttgcctctgtcctgcttcttagttccttctttggtgacaaaccaaaagaataagaggatttagaa

SEQ ID NO: 1740 - DNA, 561 bp, Homo sapiens; identical to SEQ ID NO: 1011
  misc_feature: n=a,t,g or c

SEQ ID NO: 1741 - DNA, 425 bp, Homo sapiens
ttttttttggttttgttttcattttataactataaattcaagcttagggaagcttgtttttgtcctggaaaacaaaacaaagactaaacaaagcttttttgttgttattatttgcaaacctgacctcatttagaaagagatgtaactgcatggctagaacacagcttctagcatgaatgatgcaggtgactggtggtactaagaggagacaatgaactgttgacaagattataatctgctggtggcattgctgaaaaaaagcccttgcaaatttctaaacaacagtaaactctgttaggaatctctaaagtgtcttacaggccaaaaagggaacaaggttagtaaaatgccccaacagagtttggagtaaaatactggatttgagagttactggaattgggtatgtaaaaatagggttgtaggta

SEQ ID NO: 1742 - DNA, 414 bp, Homo sapiens
taaacaataatctataacagttttactatctaaggattttcactccaagaagaaaaaatacatagtaacgccaagcttgcaggacgatgacttaacagatacattttctcttaatggaaacttatctagcttcagtaatatttctggatgtagcatcaagttgctgttgcacatttttaaaagactggtccagcagtgtttcctcttcatttaaagtattggcaatagcatcattacatggattgtccagaatgtcttcgtttaatccatttgactcctccttttgatcctcatcagtattaacctcttcaaccgtgtgtgccctgggtgtattcattaacatatcatttcctagggtctgactattactcagcagctttgcctgccttctttccaaggccagttggtttattg

SEQ ID NO: 1743 - DNA, 383 bp, Homo sapiens
  misc_feature: n=a,t,g or c
gcaacaacttcaacagacagctgagccacgccatgccacgggctgccacggncaccacggggaaccatgtcactggactttagatgacaaaatgctgtcaggaagatgcttgctctgaccttgggggccagaacccgagagaaggactgatcctgtcgccttcttaaagagttggtggcagcaacttctgagaacttgacaccagaaacatcaacagcctccacaccacgtagtttctgattccatctttaaaaaatcttgtgttgttttgtcgagaaattgcaggcttttatgttttcaaagaactaaacacaatactgagaagtccaacttttagccagaatacataaattcctgaaaatgtatagatttgaaaaataaag

SEQ ID NO: 1744 - DNA, 421 bp, Homo sapiens
  misc_feature: n=a,t,g or c
attagaaaaaaaaacttctttaatgggaaattttacgattgaaatgatgtttcatcttatagaccacaaacaaatgtttttagacattgaaaagtggttaaagaccaactgcgcccagtcccccaagtgccattttctgagtgcagaatggagggtgacgtcttgagctgatgctgtgtccccagcatcaggttttctgttttccctcttctccctttattccttccttgtccattgccctcaaccttctttttctgtttgctctggcctggttcagtataacatatccatgaactctagtatgggcctacggacaatcatagctacaatcagactttctaagcaaatggggaatgtggatntacatataaccattagaaaccctatcatcacctcctagaggggaagtgaatttcttaat

SEQ ID NO: 1745 - DNA, 279 bp, Homo sapiens; identical to SEQ ID NO: 1012
  misc_feature: n=a,t,g or c

SEQ ID NO: 1746 - DNA, 337 bp, Homo sapiens
ttttttttttttttatctttaaaaacagatttaatgtgttaaaaaaaaatagaatcaagtggtgtgcttcgccactgagatgattgtgctgtggctccggggccacatagcaccagggctcgatagcagacaggagtttcggccctcgtccagtgcatgtgactggtgcaggggcggaggcaagccgcacgggggccagagcaggaacacagccacctgttccaacaggcgctgtgccttgtatgccccgtacatgtgcctgccctgagaggagcatgggccaggcctctcttccagctgtgcccccagggtgccagtgaggcagggcgacctctca

SEQ ID NO: 1747 - DNA, 563 bp, Homo sapiens; identical to SEQ ID NO: 608
  misc_feature: n=a,t,g or c

SEQ ID NO: 1748 - DNA, 244 bp, Homo sapiens
  misc_feature: n=a,t,g or c
ttttttaatgcacaaaggttttaataccttggctttaatgatttttcaaggttaagaaacaaattcaaattggttggagcttcaactcagtaattacaatcacaatgcatctctganaggccctgcatttggaggcagagtaatctgcaaagatgatngtttttacatatgtcctgttacctacaccaatataattacnacattgtcttataaagacaaacagttgcttcaaactctttaaaag

SEQ ID NO: 1749 - DNA, 572 bp, Homo sapiens
  misc_feature: n=a,t,g or c
tttttttttttcccaagtcagagattttattgaaaaaaaaaaattacagtacttaaaaattcaaacaaggacgattcagggttgaaagaaagaaaacccgaagagtccattgtcttcagtaaagttttaaatacaaaaaacatagaccagaaaaacagcttatggcctaatgcactagttccatgataaacacacatatatagtatgtctccatcaagtgaaacttcatcacctttttacaatttagagagggaaagcagcttttagtatggttaagccatgtatcatcaataccatgaagctagcctatcagttgtaatagcttctataaaataccacagtgagattgcaataagcctagaaaatgggctacaaatcccagctatgctcaagcaagcagtgaaccaaaaataaaaataggtaaaactgaaccaagaactagataggcttctctagattctgattgataaggcaagttctaggccaggttttaaagtggcttattcagatctaaagacgtctttaccgattaacnaagcatttgtattcngaaaaaaactgantttcctcca

SEQ ID NO: 1750 - DNA, 430 bp, Homo sapiens
taaagaataatttttattatttgttcatagccaaagtgtaagggttttctaatctacccccaaaaagaatttgttgatctaccatgtaaaaatcttatctgtattgtacaaaaactcaatgcattttaatacagttttgatgttaatttgactttgttagtatgtttttgtagtcgaaggccatgggtcttatatctaagaaggaagacactttggatatttatttataataattttgttccattctctttcttgtctgctctctttttcctgcttaaagtatgatgtgtcacaactataataaggcaaatgattcctatcaaacccattgctggttaaaactcctttcaatataagataatctctggcaggtacaggatcagaattgggggggaataaaccagaagcgcctgggcaatggttagataca

SEQ ID NO: 1751 - DNA, 355 bp, Homo sapiens
  misc_feature: n=a,t,g or c
cccaatgatctgaaagttaattttttattagatgctctagaattcttgactattagtatttaaagaagcctaagtataaaagtcaactcataaattacttcgacatacagcttctgaattgcaatctcaaaagacagaaataaccgagagttggctataaaaattataaatggaactaaaaatttaaacaataaaatgatcaaagaatggtttgatctacaattcctaaacaacctgatcaaagtacaaaggataagcaaagtaatgtttttttgaagttcaaagttgaaaagtagaaagtcgngacacaaggagntaataaaanatctaacccnttgaccagggaaaagtttac

SEQ ID NO: 1752 - DNA, 459 bp, Homo sapiens; identical to SEQ ID NO: 1014
  misc_feature: n=a,t,g or c

SEQ ID NO: 1753 - DNA, 466 bp, Homo sapiens
  misc_feature: n=a,t,g or c
ccaaagtagatcctttattcaaaatctgtgggggttttttgactgtttttgctgacctgtgacctctcactgaggacggcagtcaggaccacccccagaggttcaaagacctccgaaaccagagaccacccccacatacaggtccatggagagggcctggaccatctggacccccacggtcaggccaagtcccagataatagcaccagatgtttcctgtccgacttttggtctccccaaggcgaccagaggccgagctgcccctacacangcgcaaggccgaggcagggcgcanacangcatctcaggtgtccatctcgccggcggggncccagcggaccctcggggcccagagtcagagancggagatgagcgagcgcagggagtctggctggaggcactcagaggcngtagcccgcgagaaccctcagcctgggggtccccggggangcagggcaaggcagcct

SEQ ID NO: 1754 - DNA, 258 bp, Homo sapiens; identical to SEQ ID NO: 611
  misc_feature: n=a,t,g or c

SEQ ID NO: 1755 - DNA, 460 bp, Homo sapiens
gagataattataaatgctccttttgctttttattaaaatgtcacagcatgcctagagaacagtttatatggctgcataaagtctgaaacacaagaaaactaataaaaaaccacctgttaaatacacaattatgattaatgatgtcccttcaattaaatcttgtgtgtttaaaatgaaaaacacgcagcctggtacaaatatccatatttcaatttgcgatctgctgcattggcatgagttttggtgaaactgcaaaatcacacccagtactcttctgtacgtcatccactgtcaggccttcccagagctcaatcagagtcaaccctttcttcttgtccacatcaaacacagccttttcagtaataatgcggttgacacattgctttccagtcaatggtaatgtacatttctccatgattttatgtgcatttccctttgcagaatgctccatggtgaccac

SEQ ID NO: 1756 - DNA, 394 bp, Homo sapiens
caggctgggaatgtcactttatttggatttggttcgtggggtgggggtctcagaacaaactagaaggccttacataggcagctgggcccagccagctggcgtcctgacccaggacttcattctggcctgtccccccaaagcatagcctccaccttctcacccttctccagaggagtctcctccacccccacaggagctgtggacaggccctgcagccctagggaaggaggaagggtcctgcaagtagacactaaggcacagcgtggcccaggggtcataagggctcttctggcggtggcatctgctggggcttccagctgggcgggggctccacgcaaccactgaccatccagaagtagtttgggtgcacctggccctgcacggcctcgctaac

SEQ ID NO: 1757 - DNA, 459 bp, Homo sapiens
ttttttttcacacagaatggaataaaactttattctttttaaattccacacataaacgagatgctgaaaaagcccttgccatctctgacagaaaagcagagcagctctgtttcatgaacgacagcacaattaaagctaaaataatataaaaataattcgaaaaaatcccttttactgtacactctcaaagcaagaaagagaaacaacagttttgttttgtttttttctgctagccagaaaatgtgtttctattcatttgggctttgaagttcagtgtaccccacatctgtgtgtctgtgtgtgtatgcgtggctatgtgcgtgtaatctatgcagtgtggaagcccctaatcttttcatctagtttgcctaatcattaagctacttaaccaattataatactattatgtcacattgaacaactttacataattgcttctttgaaatactagaaacattg

SEQ ID NO: 1758 - DNA, 297 bp, Homo sapiens; identical to SEQ ID NO: 1030

SEQ ID NO: 1759 - DNA, 203 bp, Homo sapiens
  misc_feature: n=a,t,g or c
aacagtttacttttttaatataaagattttncaatttacacttgtaggagtagaaaaaactaatatgctaagnctgtaagctacgcagcaaaaataatgatcttaatgaagccagaattctgtgaaaatgtgcaccacactgcatatatagtagctgagtaaatgtaaaccatgngcttattaactcttctatataaaatatt

SEQ ID NO: 1760 - DNA, 354 bp, Homo sapiens; identical to SEQ ID NO: 1037

SEQ ID NO: 1761 - DNA, 416 bp, Homo sapiens
ctttgggttttgttttgattctgtttgacccacttaactaaaatgatactatagatccttcaaaagcagaatcatgccagttacacatctcaaatcctttgatctacttacttcgtactttaagaggtaaatttgagaatgaaaatgggagactccaatgcaataacacctacataaggaaaaacacacataaacacccacacatattccccagcctcaaaactaaagcaaggtacacatttacatttccaaaccccaaagcctaaactgtccaggaaaagattctagctttgtgggctgagtttattttgcttctggttataaacaaatgtagtgtatacacacatctgtccaagaaatcttgcacaaggtggattttacatggggtatcatgcacaagattaaaaacaagacca

SEQ ID NO: 1762 - DNA, 136 bp, Homo sapiens
gatccctgtagaggtggtattaaagatggtcactgagattaagaagattcctggtatttctcgaattatgtatgacttaacatcaaagcccccaggaactactgagtgggagtaataaacttcttgttctattaaa

SEQ ID NO: 1763 - DNA, 442 bp, Homo sapiens
  misc_feature: n=a,t,g or c
ttttattcttgacatgggaaaattttatgaaattcaaattttagtgtccataaataaagttttattggaacacagaatatgtaatatattcattggtttatgtatttgtctgtatgcctacatctgatatgcaaaactatgaaatattcatacatataaaaggcaggtcaaaaatacaactataaaaaatttataagtaatttacttttagccctttggagaatttatttaacaattaacacatggctaccactacaattttttttatttttttgagtcaagagttactttattgcccaggctggagtgcagtgattgggtgtgattgtggctcaccgtaacctcaaactcctggggcccaaaggaatcctcctgcctcagcctcacaagtaggctgagaccacagggcatntgccaccatacccagctaagnttaaatttt

SEQ ID NO: 1764 - DNA, 310 bp, Homo sapiens
tttttgaaggcttaagcaatcggggacgagctttattgaggcaatcacatccacatttcagttgtttgcaatgattggcaaacggatgagttaaaaaagccttctgcttccacactgttccgtctacattcagaaagcagtaaaaatatattcgtgcaatgaacactttccaccttaagcgtatcatgacagttcacaaatttgccaacagacaatgcaaaacaatatttacaagatagaccctttgtaagttccaaatttagatacttgtggtgtaattctaaaactaacatcgcatgtttttccaggt

SEQ ID NO: 1765 - DNA, 447 bp, Homo sapiens
  misc_feature: n=a,t,g or c
ttcggttctcagtgttggaaagtaatatggtaaaacttctcttctccgaggacaatagaatagtatttgttgtatagactgaaccatcctccaaaatttggaagtcaggatcacttgaatgaattagatttgcagctgtaaagcactctttcaggttaactctaccaacaagtttctcggcatctagtttggagggaacatgtaatgtcacatttttgcaggcatcactggcaaatattaagatcgcgagggtcagcaggagcagccggcagagggctccgttccaggagccggacgggcggngctgcctccatggagagggctcggggcaggtcgcgggccgancgtcgggccgggggttaggagggctccgcggggcgagggccgcgncggaagcgcagtctgggcccgctgctcaggaggaacgcgaagcganggaggttgggg

SEQ ID NO: 1766 - DNA, 450 bp, Homo sapiens
aaatcttaaggatgctattgaagggttttttgataaagtagccaacagcaccaaaaaataacagaatggatttcctaatgaaatcaggcacaggtctccctcatgtgacccctccaaggcaggcagtcttttccgtcttcctcgctcgcttttcttctttcctggaacagatgcatagtgatgtgctggtggagagcccactcgctcccgtctcctcgttccacctatggttaggaaacaacgtccgccttcagctgccacaaccgcccagagaaacaaaacgggggtgccccggcttcccagatcacaagctcatctggcacacggcagaagacgacagccaaagcaaagccatttcaagtttcgtgtgtgtgtgtgtgtgtgcgcgtgtgtctcctatcccttctaaaaaatctggctcacatgactgatggtttttaaatttgttct

SEQ ID NO: 1767 - DNA, 441 bp, Homo sapiens; identical to SEQ ID NO: 67

SEQ ID NO: 1768 - DNA, 328 bp, Homo sapiens; identical to SEQ ID NO: 69
  misc_feature: n=a,t,g or c

SEQ ID NO: 1769 - DNA, 358 bp, Homo sapiens; identical to SEQ ID NO: 645

SEQ ID NO: 1770 - DNA, 463 bp, Homo sapiens; identical to SEQ ID NO: 1069

SEQ ID NO: 1771 - DNA, 479 bp, Homo sapiens
  misc_feature: n=a,t,g or c
tgtagttcaataatattttattgtcaatagcataggagaaattcaatattgaatctcagaacaagaagaacctatttacaatgcatgtcaaggaagagatgggagaaggaatgtcacaaaattttttggtaaatacatattttttatagagaagtaatccatgaacctgcaacatggatagcttatccaaccaactttacaaattactattaatataagttacatgcttgccatctaaagtaactaaacccatagactgaaaaactatgtgtcaaggtaacgtgagcactttaatcactttacttatattttctaaaggcagtagtttcctctccttttcccgctatccatattaggatgaagagacaagttcctttccaacaccaaattctggatatcgggctattggtggaggaatccctggtggcgagtcagctagaagcccctggccacccaggnccaggtggccaacccaatgg

SEQ ID NO: 1772 - DNA, 401 bp, Homo sapiens
gtgatttccaaggcctttattttatagggaagaggaataaaagatcaatgctagtgggtgtttcgtcatgagcccaaagcccgttgggagtctctgcgaggtcatttgccctttagattctgcaaaggcaaaaagaaatcgatactgatttttaaaaatatatcttaggagccctggtctcctgctgattccatggatgcctggagcacttgtatctggagaatggagacaatatcaccccaagcccgaattcatttgatgagactactatgtataaaacagttaattatatacataaataacataaaataattctcataaattaaaagtcaaatgatctcccactattcattcaactgagaggtgagagctaggcgcgagtgatggtgggtaaggtgcct

SEQ ID NO: 1773 - DNA, 410 bp, Homo sapiens
caatcccgctgaagaattggaacatagttatattggctggaggtttggacattcctagagcaatacatatgcctttcaactcttgaaagacctcactaccgcctccttcttgagctttttttggaggagcattcacacagagcattctggcagcttctagttctgagatgaggtatgtgagcaagaggaggcagttcttctgaatgagaaggcgcttggtcacatccccagatgtcagtgaaagatacgggcagttcatctcccctagtagcccactcacctcaagctggaattcttcagcttcactcggactgttagttgcttgcacgttttcctctagtttacagagcactcttaattcagacaccagccaagcacagagttttggtaaactcgggggaactggctcc

SEQ ID NO: 1774 - DNA, 417 bp, Homo sapiens; identical to SEQ ID NO: 1075
  misc_feature: n=a,t,g or c

SEQ ID NO: 1775 - DNA, 115 bp, Homo sapiens
aaaatgtggaactagtattcattttttattcaaatattttataaattatcatattggaggccctatagtgtggtagtttacagcatgaactctgtattccaagtgctcacgttcc

SEQ ID NO: 1776 - DNA, 415 bp, Homo sapiens
tgtatgtttcaacaagaaaaactactgtttattttttatgtcaatattgtagttacattttcagaatcacatgctgtgggaaaaaatcagcaagcagaaggtttataataaaccaaaagatttatttataacattttctgaattcacttaaaaaacaaaaaggaatcccccttccctcaaaatagaaccgtttcctacagattccatccagtatgacttttcagatatctaaggagattttgctacacttattacaatggtagttttcccacagtgtaattctctgatataggtttgaaatattgcagaaagtcactctacattcatttatacagttgctttttctcctacaagagtattaaaatttaagtattgcattgtaaatggaaggcattcccaaatcactggtggtttg

SEQ ID NO: 1777 - DNA, 459 bp, Homo sapiens; identical to SEQ ID NO: 649
  misc_feature: n=a,t,g or c

SEQ ID NO: 1778 - DNA, 397 bp, Homo sapiens
  misc_feature: n=a,t,g or c
ttttttttttttttttcatagatatgattattttatttataaagctagttaagcacaccggagataaatgatttcacttatgaaatgttttcttatcctgcagttatatgatacaggatttaaaggaagagcaagttncctaagtctataaactccagagcaccctctagtggacttgagggtgggaaataatttcactgaagatgaaaaccctaccacaattcagacttgaacatttcaggacagattgggaggttaaactgaagacaatgaacaattcttctctacctacaaaaagactgcaattgtgttaccttttagacttacaattctgaacggcctataacttaccaaaccaattnggccttttaaaaaagggtacttggcttcccccccn

SEQ ID NO: 1779 - DNA, 478 bp, Homo sapiens; identical to SEQ ID NO: 19

SEQ ID NO: 1780 - DNA, 533 bp, Homo sapiens
tatgtcactattttattgatgatgtgttttatagaatcacaaaatttagaaacataagaaggatttaggtatcacctaaattcaaagaaatgtgtgtttctaggttgctaaattcaaagaaaaagtatgatttggtttggttcatttaaaacaggtcacaaacagaattatatttcaaatttagaagatacggtattaagtgattcatcttattttggacatttttcctcaaggagaatttttctggaagaaaaagtacatttatatgtgggcttattaagagaaagagagaaaggcatgctattttaatcattaaattcttgatgatgacgatcatcatcaagatgagaaagaaaagaaatatgagccaagagaatctgttgttgccagcaatcagtttaccagaacatctgcaggtgaacattttccaaatggagtgacagactaattgcatctacggggatgagaatctgccatagagaggatgctgtgggcttattttgcttatgtagataggaagggtgatacatgga

SEQ ID NO: 1781 - DNA, 348 bp, Homo sapiens
cgtcgtccttgtcgcggctgcgggtgctggtggtcggggtggaggagccggcgtcgctgtctcgcttgcgcttccgtgatgatttcttctgccggacctcctcttcgatctcctccagcgtgccctcctcgatggccttcagggtcttgagccactgcttctccgtcagtgagtcgctgtagtccacctccttgcggtggcgggagcacggccgaacatcttctcctcctcctcctcacaggtcagccgctccacctccgcgtcgtccttgatgatccacgaggggagctcgtcctcctccatgaggcgcggcttccgcattgggggttgcgggccttcctcgcgcct

SEQ ID NO: 1782 - DNA, 413 bp, Homo sapiens
tttggaaaatgacaggtttttattgctatgtttgcagtggctttttagcacagtaagaatgtccccgcaggcccaccaccctcacgcagccccagccctccagcctctgtccgggtgtcagggaagcctttcttggggtcactcagccgtctcgggactggacgtgacagacatacgtgggttaaagccgctacacagaagactggaggtgcaggaagtgcatccgccttgagcctggatgtgggagccgtgtccggggtcccttcctggggctgtgcacgcccagggcacagggtgggaagcctgagcaggccaggttagcagcccagacacccaggatggaatattgcagcctcttgccccacagacacccaagctcacacaattgatattggtggtgattggcgcaggaa

SEQ ID NO: 1783 - DNA, 365 bp, Homo sapiens
ttgtcggttaatttacactttatttttttaaaaagttgatttaaaaaagaaacaacacaagtttagaatccataaaatgtcagcaatgctgatgtgcactggactgaaacatcttgatcatcttctgatagaagtaatattccatacaaaaagattcttagattccattttttgcttcattattgtttgtggcttgctttctttgagcaataaaggggtacatacacttgtccgctcctaggaaccgatacatgcacacaactgcttcaaatggtaggatgctcttcatgaaggtcacgatgtacatgaggcggggagtgcagatcatgggctggtcagtgaggatggccttcatggcctgcttt

SEQ ID NO: 1784 - DNA, 419 bp, Homo sapiens; identical to SEQ ID NO: 1100
  misc_feature: n=a,t,g or c

SEQ ID NO: 1785 - DNA, 195 bp, Homo sapiens; identical to SEQ ID NO: 50
  misc_feature: n=a,t,g or c

SEQ ID NO: 1786 - DNA, 316 bp, Homo sapiens
  misc_feature: n=a,t,g or c
catcttattgcctttattctgctgtnggcccagctggccccattgtagggcacagggccaagcttttacacgctcacccatgctctctgtgcaggccagtgcgtgcacacacacacgcgcgcgcgggcacgannacacacatacacactcacacatcccatctntggctctgagagtcagtctntggggggcaaagggcaactcctcagcctgcccctgcctgcccttttatgacagcaccaagggcgggggtggggacagggccctcagcccccagaacaaatccctgtgcaaactngaggtgcaagctgggctt

SEQ ID NO: 1787 - DNA, 34641 bp, Homo sapiens; identical to SEQ ID NO: 1110

SEQ ID NO: 1788 - DNA, 836 bp, Homo sapiens; identical to SEQ ID NO: 1113

SEQ ID NO: 1789 - DNA, 3406 bp, Homo sapiens
ctgtagtggcggagaggatcgtggtactgctatggcggaatcatcggaatccttcaccatggcatccagcccggcccagcgtcggcgaggcaatgatcctctcacctccagccctggccgaagctcccggcgtactgatgccctcacctccagccctggccgtgaccttccaccatttgaggatgagtccgaggggctcctaggcacagaggggcccctggaggaagaagaggatggagaggagctcattggagatggcatggaaagggactaccgcgccatcccagagctggacgcctatgaggccgagggactggctctggatgatgaggacgtagaggagctgacggccagtcagagggaggcagcagagcgggccatgcggcagcgtgaccgggaggctggccggggcctgggccgcatgcgccgtgggctcctgtatgacagcgatgaggaggacgaggagcgccctgcccgcaagcgccgccaggtggagcgggccacggaggacggcgaggaggacgaggagatgattgagagcatcgagaacctggaggatctcaaaggccactctgtgcgcgagtgggtgagcatggcgggcccccggctggagatccaccaccgcttcaagaacttcctgcgcactcacgtcgacagccacggccacaacgtcttcaaggagcgcatcagcgacatgtgcaaagagaaccgtgagagcctggtggtgaactatgaggacttggcagccagggagcacgtgctggcctacttcctgcctgaggcaccggcggagctgctgcagatctttgatgaggctgccctggaggtggtactggccatgtaccccaagtacgaccgcatcaccaaccacatccatgtccgcatctcccacctgcctctggtggaggagctgcgctcgctgaggcagctgcatctgaaccagctgatccgcaccagtggggtggtgaccagctgcactggcgtcctgccccagctcagcatggtcaagtacaactgcaacaagtgcaatttcgtcctgggtcctttctgccagtcccagaaccaggaggtgaaaccaggctcctgtcctgagtgccagtcggccggcccctttgaggtcaacatggaggagaccatctatcagaactaccagcgtatccgaatccaggagagtccaggcaaagtggcggctggccggctgccccgctccaaggacgccattctcctcgcagatctggtggacagctgcaagccaggagacgagatagagctgactggcatctatcacaacaactatgatggctccctcaacactgccaatggcttccctgtctttgccactgtcatcctagccaaccacgtggccaagaaggacaacaaggttgctgtaggggaactgaccgatgaagatgtgaagatgatcactagcctctccaaggatcagcagatcggagagaagatctttgccagcattgctccttccatctatggtcatgaagacatcaagagaggcctggctctggccctgttcggaggggagcccaaaaacccaggtggcaagcacaaggtacgtggtgatatcaacgtgctcttgtgcggagaccctggcacagcgaagtcgcagtttctcaagtatattgagaaagtgtccagccgagccatcttcaccactggccagggggcgtcggctgtgggcctcacggcgtatgtccagcggcaccctgtcagcagggagtggaccttggaggctggggccctggttctggctgaccgaggagtgtgtctcattgatgaatttgacaagatgaatgaccaggacagaaccagcatccatgaggccatggagcaacagagcatctccatctcgaaggctggcatcgtcacctccctgcaggctcgctgcacggtcattgctgccgccaaccccataggagggcgctacgacccctcgctgactttctctgagaacgtggacctcacagagcccatcatctcacgctttgacatcctgtgtgtggtgagggacaccgtggacccagtccaggacgagatgctggcccgcttcgtggtgggcagccacgtcagacaccaccccagcaacaaggaggaggaggggctggccaatggcagcgctgctgagcccgccatgcccaacacgtatggcgtggagcccctgccccaggaggtcctgaagaagtacatcatctacgccaaggagagggtccacccgaagctcaaccagatggaccaggacaaggtggccaagatgtacagtgacctgaggaaagaatctatggcgacaggcagcatccccattacggtgcggcacatcgagtccatgatccgcatggcggaggcccacgcgcgcatccatctgcgggactatgtgatcgaagacgacgtcaacatggccatccgcgtgatgctggagagcttcatagacacacagaagttcagcgtcatgcgcagcatgcgcaagacttttgcccgctacctttcattccggcgtgacaacaatgagctgttgctcttcatactgaagcagttagtggcagagcaggtgacatatcagcgcaaccgctttggggcccagcaggacactattgaggtccctgagaaggacttggtggataaggctcgtcagatcaacatccacaacctctctgcattttatgacagtgagctcttcaggatgaacaagttcagccacgacctgaaaaggaaaatgatcctgcagcagttctgaggccctatgccatccataaggattccttgggattctggtttggggtggtcagtgccctctgtgctttatggacacaaaaccagagcacttgatgaactcggggtactagggtcagggcttatagcaggatgtctggctgcacctggcatgactgtttgtttctccaagcctgctttgtgcttctcacctttgggtgggatgccttgccagtgtgtcttacttggttgctgaacatcttgccacctccgagtgctttgtctccactcagtaccttggatcagagctgctgagttcaggatgcctgcgtgtggtttaggtgttagccttcttacatggatgtcaggagagctgctgccctcttggcgtgagttgcgtattcaggctgcttttgctgcctttggccagagagctggttgaagatgtttgtaatcgttttcagtctcctgcaggtttctgtgcccctgtggtggaagagggcacgacagtgccagcgcagcgttctgggctcctcagtcgcaggggtgggatgtgagtcatgcggattatccactcgccacagttatcagctgccattgctccctgtctgtttccccactctcttatttgtgcattcggtttggtttctgtagttttaatttttaataaagttgaataaaatat

SEQ ID NO: 1790 - DNA, 6586 bp, Homo sapiens; identical to SEQ ID NO: 1115

SEQ ID NO: 1791 - DNA, 4468 bp, Homo sapiens
gcagcggcaaccccggcgccgcggcaaggactcggagggctgagacgcggcggcggcggcgcggggagcgcggggcgcggcggccggagccccgggcccgccatgggcctccccgagccgggccctctccggcttctggcgctgctgctgctgctgctgctgctgctgctgctgcggctccagcatcttgcggcggcagcggctgatccgctgctcggcggccaagggccggccaaggagtgcgaaaaggaccaattccagtgccggaacgagcgctgcatcccctctgtgtggagatgcgacgaggacgatgactgcttagaccacagcgacgaggacgactgccccaagaagacctgtgcagacagtgacttcacctgtgacaacggccactgcatccacgaacggtggaagtgtgacggcgaggaggagtgtcctgatggctccgatgagtccgaggccacttgcaccaagcaggtgtgtcctgcagagaagctgagctgtggacccaccagccacaagtgtgtacctgcctcgtggcgctgcgacggggagaaggactgcgagggtggagcggatgaggccggctgtgctaccttgtgcgccccgcacgagttccagtgcggcaaccgctcgtgcctggccgccgtgttcgtgtgcgacggcgatgacgactgtggtgacggcagcgatgagcgcggctgtgcagacccggcctgcgggccccgcgagttccgctgcggcggcgatggcggcggcgcctgcatcccggagcgctgggtctgcgaccgccagtttgactgcgaggaccgctcggacgaggcagccgagctctgcggccgcccgggccccggggccacgtccgcgcccgccgcctgcgccaccgtctcccagttcgcctgccgcagcggcgagtgcgtgcacctgggctggcgctgcgacggcgaccgcgactgcaaagacaaatcggacgaggccgactgcccactgggcacctgccgtggggacgagttccagtgtggggatgggacatgtgtccttgcaatcaagcactgcaaccaggagcaggactgtccagatgggagtgatgaagctggctgcctacaggggctgaacgagtgtctgcacaacaatggcggctgctcacacatctgcactgacctcaagattggctttgaatgcacgtgcccagcaggcttccagctcctggaccagaagacctgtggcgacattgatgagtgcaaggacccagatgcctgcagccagatctgtgtcaattacaagggctattttaagtgtgagtgctaccctggctacgagatggacctactgaccaagaactgcaaggctgctggtggaaagagcccatccctaatcttcaccaaccggtacgaggtgcggaggatcgacctggtgaagcggaactattcacgcctcatccccatgctcaagaatgtcgtggcactagatgtggaagttgccaccaatcgcatctactggtgtgacctctcctaccgtaagatctatagcgcctacatggacaaggccagtgacccgaaagagcaggaggtcctcattgacgagcagttgcactctccagagggcctggcagtggactgggtccacaagcacatctactggactgactcgggcaataagaccatctcagtggccacagttgatggtggccgccgacgcactctcttcagccgtaacctcagtgaaccccgggccatcgctgttgaccccctgcgagggttcatgtattggtctgactggggggaccaggccaagattgagaaatctgggctcaacggtgtggaccggcaaacactggtgtcagacaatattgaatggcccaacggaatcaccctggatctgctgagccagcgcttgtactgggtagactccaagctacaccaactgtccagcattgacttcagtggaggcaacagaaagacgctgatctcctccactgacttcctgagccacccttttgggatagctgtgtttgaggacaaggtgttctggacagacctggagaacgaggccattttcagtgcaaatcggctcaatggcctggaaatctccatcctggctgagaacctcaacaacccacatgacattgtcatcttccatgagctgaagcagccaagagctccagatgcctgtgagctgagtgtccagcctaatggaggctgtgaatacctgtgccttcctgctcctcagatctccagccactctcccaagtacacatgtgcctgtcctgacacaatgtggctgggtccagacatgaagaggtgctaccgagcacctcaatctacctcaactacgacgttagcttctaccatgacgaggacagtacctgccaccacaagagcccccgggaccaccgtccacagatccacctaccagaaccacagcacagagacaccaagcctgacagctgcagtcccaagctcagttagtgtccccagggctcccagcatcagcccgtctaccctaagccctgcaaccagcaaccactcccagcactatgcaaatgaagacagtaagatgggctcaacagtcactgccgctgttatcgggatcatcgtgcccatagtggtgatagccctcctgtgcatgagtggatacctgatctggagaaactggaagcggaagaacaccaaaagcatgaattttgacaacccagtctacaggaaaacaacagaagaagaagatgaagatgagctccatatagggagaactgctcagattggccatgtctatcctgcagcaatcagcagctttgatcgcccactgtgggcagagccctgtcttggggagaccagagaaccggaagacccagcccctgccctcaaggagctttttgtcttgccgggggaaccaaggtcacagctgcaccaactcccgaagaaccctctttccgagctgcctgtcgtcaaatccaagcgagtggcattaagccttgaagatgatggactaccctgaggatgggatcacccccttcgtgcctcatggaattcagtcccatgcactacactctggatggtgtatgactggatgaatgggtttctatatatgggtctgtgtgagtgtatgtgtgtgtgtgattttttttttaaatttatgttgcggaaaggtaaccacaaagttatgatgaactgcaaacatccaaaggatgtgagagtttttctatgtataatgttttatacactttttaactggttgcactacccatgaggaattcgtggaatggctactgctgactaacatgatgcacataaccaaatgggggccaatggcacagtaccttactcatcatttaaaaactatatttacagaagatgtttggttgctgggggggcttttttgggttttggggcatttgttttttgtaaataagatgattatgctttgtggctatccatcaacataagtaaaaaaaaaaaaaaaacacttcaactccctcccccatttagattatttattaacatattttaaaaatcagatgagttctataaataatttagagaagtgagagtatttatttttggcatgtttggcccaccacacagactctgtgtgtgtatgtgtgtgtttatatgtgtatgtgtgtgacaggaaaatctgtagagaagaggcacatctatggctactgttcaaatacataaagataaatttattttcacacagtccacaaggggtatatcttgtagttttcagaaaagcctttggaaatctggatcaggaaatagataccatggtttgtgcaattatgtagtaaaaaaggcaaatcttttcacctctggctattcctgagaccccaggaagtcaggaaaagcctttcagctcacccatggctgctgtgactcctaccagggctttcttggctttggcgaaggtcagtgtacagacattccatggtaccagagtgctcagaaagtcaagataggatatgcctcaccctcagctactccttgttttaaagttcagctctttgagtaacttcttcaatttctttcaggacacttgggttgaattcagtaagtttcctctgaagcaccctgaagggtgccatccttacagagctaagtggagacgtttccagatcagcccaagtttactatagagactggcccaggcactgaatgtctaggacatgctgtggatgaagataaagatggtggaataggttttatcacatctcttatttctcttttccccttactctctaccatttcctttatgtggggaaacattttaaggtaataaataggttacttaccatcatatgttcatatagatgaaactaatttttggcttaagtcagaacaactggcccccaattgaagtcatatttgtggggggaaatggcatacgcaatattatattatattggatatttatgttcacacaggaatttggtttactgctttgtaaataaaagggaaaactccgggta

SEQ ID NO: 1792 - DNA, 3248 bp, Homo sapiens; identical to SEQ ID NO: 1122

SEQ ID NO: 1793 - DNA, 2538 bp, Homo sapiens
attttctctctatttctccctaggtcaccaagatgctggcagtggttgtaattctgtttgcccttttatggatgccctacaggactctagtggttgtcaactcatttctctccagtcctttccaagaaaattggtttttgctcttttgcagaatttgcatttatctcaacagtgccatcaacccggtgatttacaatctcatgtcccagaaattccgtgcagccttcagaaagctctgcaactgcaagcagaagccaacagagaaacctgctaactacagtgtggccctaaattacagcgtcatcaaggagtcagaccatttcagcacagagcttgatgatatcactgtcactgacacttacctgtctgccacaaaagtgtcttttgatgacacctgcttggcttctgaggtatcctttagccaaagttgattcatgaattagaagaaaatggatgacaaagaaaatgagaatctgtgcagtcatcaacaaaagggagaacatggccaatagtcatatgtgaagacagagcagatcagtctttgtcaatgctctaacaaattctggccctagatactttaacccatgaggatgattcagactttccttcttacaaactaatatcactaaaaatggagcagatctgtgaaatagctaaatgatggaaacttaaagtttagcccttttcatttaacttaagaaattcactatattttctggacttatagagtttcaataaaatctagacatcaatttacattattcatagtaaccttatcaaatgtcacttttcaacttccctaatttatttatacattcgataatttgacaacatgcagatttttaaatgtttgcatttagtattcattttaacatagtacagggctagttcatgaatatctgaaattaaagggaaaaatattacagaaacattttatttattgagtaaaaataagattttagacatacatgttaactgtattttaaaagttgccataatgtttataaaattctgagatgatttttatatcttagaaggtagataatcatcactcaactttaatgtaaaataaacctcaaaatatctgaaattattaattaaggagaaatgtagattttaagataaatccaactcttatcaactcttccagcctcccacatgatgggtggaaaaaggcaaaagcccagattaagtaactgtgaagatacaaactaacatacaattaaatttgaaaagtatagtcaagacaaagcaagtatttataattagattttgcttcttctctgacgcttttaagcaataaaatctttttgaacattcttgtttataaactactcagccatgtcaagcaaatcattcaagcaaaatctagctgaaaagtctgaaacattcttaaaagctttgttattctaagtcagccaaaatcctggtatccctcttccagataaagagctcccactgagaattgtagtctatggattttaccttgactgcaattgtctttccttcctatctgcttgttgtttgtaggttctttttttgtttttctcaaatgctagtgatattttgtttacagattctaaaagcaatgcaaaattctgttggctttattttcagcagagttaaaactgatttcatcatattatcagtatgtcatctttatatttatgactgacatctgctattccagtgtttattggagacttgtgaatgaatctgtccaggacacttgtcagttcctacctgaatctcttacctattgagatttggccaaccagaatctccgagggcaaaaattgcccttggtgatggttcagtagtcattgatttttaatgagtagatcaaaaaagtacccatacctttacatgcccgtaggctgtcattttccctctccagcctatatccctattttatggacttttctagaacctaatcgctaatgataattatgcctccccatcttcttaatgaagaatataccattcttctgaaacttgtttttacgtgctgtttcatggagactatgctatccagaacctcattctagagtgcgcttttttttttttgaaaattggccttatctactccagcaagacatttttatcctgttactataacagtaaatgaatgcaagcaaatatttgcaggaaataccctaaaaccctacctgcatgacagtaagcaatctatgttaactgacttttcattctggtataaatattaatcttggcatcatataaatagagcaccagagtgacccaaccccaaatcacacaagcacatgtgtgtttataaacacatacccacatgttcataaattggtgaaaaaggggattggaatatacgagattttttcattacagaaaggacctaatatcattgagcatcgactatgtctcaggtatgctggtaggtagtcaatcaacattatcttcatcacaatttcactacagctgtaatttctctgatgattagaccagtattcctgtgacctaattcctaattaataaaaagttatggattttgcagaatgatta

SEQ ID NO: 1794 - DNA, 458 bp, Homo sapiens
tccagtgtgtgtgtagcctccacagagaggtcgttttctcggagtccagaggggccgcctgagcttctgagaactagggaggagccatcccagccatgagcccctgtgggaatctgctgggggccaagtggcctggagtcctcaggctcccgcagctgctccggagggagaggtgagctcagggcagcctgcctgcagccagaggtgccgggagccccgggcctgtcatggtggccatctacagccggcctgaggcagtcacagacggatttgcagctgagcctgtctatctggtgtgggaagaagatggggagttacttgtcagtcccggcttacttcacctccagagacctgtttcggtgttcagaatgccaggattccctcaccaactggtactatgagaaggatgggaagctctactgccccaaggactactgggggaagtttggggagttctg

SEQ ID NO: 1795 - DNA, 6896 bp, Homo sapiens
catgccacatccccggggcgggagggggctacatccccggctttagacgcgcgagtctcaggtcccgctaattacctggcgggtgctgcccacccctgccctcgcgcacctagcgcgtggcagcgggaaggcggggcctgggggagccccacccctggagactgcggctggggcctccctctcctccgcccgcccgcctgccactagctcattgcgcctctcctgcagtctgattgggcaccggctcccattccggctccagcctccaatccgacccccatttcggctgcagcctcggacctagctccggccctcggtctatccggttgcatcctccctccctgttccggatcttatcttgcgccagcgcctactccaggatcccgtagccagacctcaagccatggctggtcccttctcccgtctgctgtccgcccgcccgggactcaggctcctggctttggccggagcggggtctctagccgctgggtttctgctccgaccggaacctgtacgagctgccagtgaacgacggaggctgtatcccccgaggtaacagtgcctgaggcgcgggaggaggcgggggcaggaggtgatgggaacgaaggtgcgggtagaagtgagaatccgggcaacagagaagggctataatcacgaaggccctggagctggagggctgtgcagtctgcagacctcagtggggtgggggtgggggccaaaaccataaagcaagaacattcctggggacctgccaagaccagctctggccctacgagttctagctgcactggctgcccaaatccctaattgtaaagccaggaactatccttttcgctcccctccatctccttccctcatttcctcaattcctctccttaggcttttcccctcctccatccgtagtgttgtgtcatgggaggaaagaactgagcagatctgaagaaactgagctggccagccagaggcaactagaactattaggaaagcatagactctgaaagtccctaaagagattaccaaggtttaccctctttctaattcccctcctcccgcggagcaaagccagacatggccaactggacagctcccaggtaactgcactaggtctaggcgtctgtgaccctccctccatggttactgggtaccccctccccagcgctgagtacccagacctccgaaagcacaacaactgcatggccagtcacctgaccccagcagtctatgcacggctctgcgacaagaccacacccactggttggacgctagatcagtgtatccagactggcgtggacaaccctggccaccccttcatcaagactgtgggcatggtggctggagatgaggagacctatgaggtagggggtccccagagtctccctgatgatccaattcatcttcccagtaatcccagctcctttcccttaaagacctctcactttcccccaagactctgagccccccatacttaagttttctgaaccagtgaaatcaatgcacaattgaagtctggggagggattccctctccttaaccatctctccctcttaactccccttaggtatttgctgacctgtttgaccctgtgatccaagagcgacacaatggatatgacccccggacaatgaagcacaccacggatctagatgccagtaaagtgagttcaaatatcccacttctgatttgcattgcctgtgtacaacactctgtatctccaaccccttcaccttatttcctgactcatggtcattatactgctgagcttttaatcttaatgtaaggaaagaatcatatcttaaggggcagcatatatggagatggaaggatagataagaatgaccatgacccaaggtgggtggtttggggacgggtctgcaatgcccccttcaattccagtgctttcccaaagggcctcttcttccaatgcatgcaggaagaatgcacacagagtcctctaatgcctaaggaaggtctctcctttcccaggggccctcagttcccaccgtgtttctgtgacttacattcatttcccttatctcccagatccgttctggctactttgatgagaggtatgtattgtcctctagagtcagaactggccgaagcatccgaggactcagtctgcctccagcttgcactcgagcagagcgacgagaggtggaacgtgttgtggtggatgcactgagtggcctgaagggtgacctggctggacgttactataggctcagtgagatgacagaggctgaacagcagcagcttattgatgtgagggccttaagagggtgctggttggtgggagcagatggggaaggctgggccagatgagacatgggctctgaaaggcccaggggccaccatgaagattcttaacccaagtcccgttactcttcccaggaccactttctgtttgataagcctgtgtccccgttgctgactgcagcaggaatggctcgagactggccagatgctcgtggaatttggtatgaagctgctcattacctcttttgtcttcatgccctcataaatgctttttttccctctatctctcccaattcttgccttgcctcttgatcactgtccctctccggccctcaggcacaacaatgagaagagcttcctgatctgggtgaatgaggaggatcatacacgggtgatctccatggagaagggtggtaacatgaagagagtgtttgaaagattctgccgaggcctcaaagaggttagagaagactatgtaggggagctaggtgggaggacataaggaaaaccaaagagtagcataaatagattatgtaatttaccaaccaacccaggacatgtcttatagtaaaaaggactatctaggactcactccaggactaaaggtgtaaaccagctgggaccatactgggaaaaccaggacatgtggtcacactaagattaggaaaagaaagagtgtcaggaatcttaggaagtgaacaaggcttttgacagagagtgcaaagaaggaataaatgagatggcacgtcagtgcctgggatgtgtgcagtgggatggtgaggtgtgcagataaggaaaacattcgagcttagattgatgttggcggggagaggttgctgtgttcatgactctaatataaccacccagttctgagacaaggtaggccttgactctggattctatcattcttgttaaagtttcgggtctaggctttaagttgagagttcggagagagactggggaaggtggaggatagaatggttcgagttctagaatatgtggctctagatgagaggttgaactgaatcatcaatcctacatggattgggtctccgtattcaagtctacattagaaatccccataaactcaattcaattcttactgtatgttctcaaacatacagttctattttaggtttgcaaagaaaaagagctcctcttttagattctgagaagtttctactatttttggcaagtaatagataacatattctgactatgagtgggtagggaagtacctttaaattatatgcctcagtttcctcatctgtaaaattgggataatgagattttctacattttaggttgttgtggggattaagtgaaatacaggtaaagtacttggtccacagtaagtgcttaataagtgttaaagtgttagctgcaatattattctggatggaagagtttccccccatgttcagcatgtaagatatcccctatggcatggttccttctgaactataaagaggatccctttactcatgttgggttgtggtctttgtgaccatcattctgctagatcccttgtctcttgaactctaatagtcatcttcatgactacatggttaagtgaagccaaacgccttccccccgccccctattcctatgaatctggcttttctgctctgttttcatctttctctgcattcacacaggtgctccgttcacagctaacagaatgttatcttacctcttcctggcaaagcttacaccttcatcttctgtctgaagggacccttctaagctctaggctcattagcaaagcaaagataatcgatgcatgcagacctcattgaataatcagtcatctctcagttcagtttaccacctctgttcatttccctagatcatccttaatacaccactccttcgagttttcttcttccacataagatattttttcacaatctcattattatgcacatcataattttgcatcatgcatgcatgaaaacaataacaaacctttttcatttaaaaaaagaccaatgtcattcattcacagccaagtttctgttctagacatatttctagtgttcttgtgggtctagctaagggagggtccagggttaatgaaatatccctgatttttcgttaacaaaacctttgtggactcaggtggagagacttatccaagaacgtggctgggagttcatgtggaatgagcgtttgggatacatcttgacctgtccatctaacctgggcactggacttcgggcaggagtgcacatcaaactgcccctgctaagcaaagtaaaggagttgtggggttacagaggggtgtgagtaaggaagggtgggttgtggatggggagggagtggaccctttggaaaggagccaaacatgttgtggctaaagggtcagaggacaggccaggcacagtggctcatgcctctaatcccaacacttgggaggccaaggcaggcagattacttgagcccaggagttcaagaccagcctgggcaacctggtgaaaccccatctctacctacaaatacaaaagttagctgggtgtagtggaggctgaggtgagaggatcacttaagcctgggaagtcgaggcttcagtgagctgtgatcactccagcctgggtgacagagagagaccctgtctaaaaaaaattaaaaaagaaaaaagaaaaaaggaaaaaaaaagttcaggagacagagctctgagcaggttcagggctctttcaggtaggacctagtctctgcctctattgaccctgctcccaatccctatctcctctctaggatagccgcttcccaaagatcctggagaacctaagactccaaaaacgtggtactggaggagtggacactgctgctacaggcggtgtctttgatatttctaatttggaccgactaggcaaatcagaggtgagatcctaagggattaggacaaggagaggtataggtctgcgagggccgaaatatggcagtgagtgagcctccgggatgtaacataatctgaaatgaaattcaggttgagtgggaggcaattggaaatgagcaggcaagtcagtcagtgataaagaaaaactcagactgtaggaagcagatcaaagattagtgtcccttaggtggagctggtgcaactggtcatcgatggagtaaactatttgattgattgtgaacggcgtctggagagaggccaggatatccgcatccccacacctgtcatccacaccaagcattaactccccatcgccagctgatgactcaagattcccaggagttttgctcattctaatgatggcccattctacttgctctggacctgcccccgcatcccctgcctccatcctagtaaagactccttgctatgctgcagctgtctgtgttacttctaatggtggggtgaggagggagcagccttcaggaaatgaaaagaggcagtgggattatttatgatggaaagagactccagatatggcaacccaggaacactgattctcaggtgggtggaaagcattaacattttacccatattcctcatcagcttctgaaaataatcaggatgcacttctgtttgcactttattcattatgacttaagatttctctccccacaatctccttctactgtagagacaggctcatagcaggtggccaaggaagctgatagtcaataccagggaccaggaaggtcgtgaccagtcctggaggccccaggctgtacttcgacctataatagacagggaatgggagtaatatcacaactcagctctccaggagcattgatacttggaaattagcgctctgcctgtagactccttcactccagggatctccctgggtgcactctaagagccagacagcaccaaattaggggtttgattctgggtcaggagatggaggatcaagctgtgcagctgggaactcaccttgctgttctgggctctcctttccctcatgttgggcccatgcaactgctcgtcgctgctcaggactcagaaaggccatttgctcaggagtgacagccacagcctgagcactggtgagactagatagttggatgggactaaacaccacctgagggcaggggtaggaatcagtgcatgcatgtagtccccattgggccctggctctcctgtggtcaccccagtccattaatacttacagcaaatttaggaggagggatgacagaaatggcaagaggagtaacgccctggatctgtccccgcagcagtgctgaaagagccaggtctgggatcccagctgttgaagcaagtggcatccaaacattgtcttagactgaccttccctctcttcaaacctatagaccttctctaactactcccaaagtgccctatcatagaccttccccaatatgtctctagccccttatttaaacaccctcaggcccccaccttaagaattgcagggcagtcttccatccagtccacccatggtatagaaaccaaaccaacttgcaccagcagtggcccagctccccacctgctatggtgccaatttcagtgaagatctcaggcccccagttactgattgggccaaacccaccaggcagtacaagtaggtgggccagaacctccagttgttcctcagagcactgcagatgcagggtgccgaggaagagagctgcttggctgtagaacagtgggaaggaaggaagaa

SEQ ID NO: 1796 - DNA, 1479 bp, Homo sapiens; identical to SEQ ID NO: 1124

SEQ ID NO: 1797 - DNA, 1924 bp, Homo sapiens; identical to SEQ ID NO: 1125

SEQ ID NO: 1798 - DNA, 2309 bp, Homo sapiens; identical to SEQ ID NO: 1126
  misc_feature: n=a,t,g or c

SEQ ID NO: 1799 - DNA, 1778 bp, Homo sapiens; identical to SEQ ID NO: 53

SEQ ID NO: 1800 - DNA, 1092 bp, Homo sapiens; identical to SEQ ID NO: 1130

SEQ ID NO: 1801 - DNA, 13500 bp, Homo sapiens; identical to SEQ ID NO: 55
  misc_feature: n=a,t,g or c

SEQ ID NO: 1802 - DNA, 2029 bp, Homo sapiens
gaattcgggcccgtcggctttcttcaaccctctcttcccggagcgcccccaatccacgagtggcagccgcgggactgtcgcgtcggcgcccgacgcggagtcagcaggggcgaaaagcggtagatcatggcaaccatagaagaaattgcacatcaaattattgaacaacagatgggagagattgttacagagcagcaaactgggcagaaaatccagattgtgacagcacttgatcataatacccaaggcaagcagttcattctgacaaatcacgacggctctactccaagcaaagtcattctggccaggcaagattccactccgggaaaagttttccttacaactccagatgcagcaggtgtcaaccagttattttttaccactcctgatctgtctgcacaacacctgcagctcctaacagataattctccagaccaaggaccaaataaggtttttgatctttgcgtagtatgtggagacaaagcatcaggacgtcattatggagcagtaacttgtgaaggctgcaaaggattttttaaaagaagcatccgaaaaaatttagtatattcatgtcgaggatcaaaggattgtattattaataagcaccaccgaaaccgctgtcaatactgcaggttacagagatgtattgcgtttggaatgaagcaagactctgtccaatgtgaaagaaaacccattgaagtatcacgagaaaaatcttccaactgtgccgcttcaacagaaaaaatctatatccgaaaggaccttcgtagcccattaactgcaactccaacttttgtaacagatagtgaaagtacaaggtcaacaggactgttagattcaggaatgttcatgaatattcatccatctggagtaaaaactgagtcagctgtgctgatgacatcagataaggctgaatcatgtcagggagatttaagtacattggccaatgtggttacatcattagcgaatcttggaaaaactaaagatctttctcaaaatagtaatgaaatgtctatgattgaaagcttaagcaatgatgatacctctttgtgtgaatttcaagaaatgcagaccaacggtgatgtttcaagggcatttgacactcttgcaaaagcattgaatcctggagagagcacagcctgccagagctcagtagcgggcatggaaggaagtgtacacctaatcactggagattcaagcataaattacaccgaaaaagaggggccacttctcagcgattcacatgtagctttcaggctcaccatgccttctcctatgcctgagtacctgaatgtgcactacattggggagtctgcctccagactgctgttcttatcaatgcactgggcactttcgattccttctttccaggctctagggcaagaaaacagcatatcactggtgaaagcttactggaatgaactttttactcttggtcttgcccagtgctggcaagtgatgaatgtagcaactatattagcaacatttgtcaattgtcttcacaatagtcttcaacaagatgccaaggtaattgcagccctcattcatttcacaagacgagcaatcactgatttataaatgcttaactatagaatggcttatgactacccaaaacagtgccccatcaacaaatggggaaaattgccttttgagctcaggaataatttataaattggggactaccttttagttctttagcatattctatttcttattgttttatataatttttaaatcatttgcttcctccttatgtttaacagcagaggggtaatcaccttaaaatgtcatcaaaaatagatctactagaaggcagcatcacattcccatcttacttatggactcctacccctggttcatgtcttatatgcctgtaatggttataaagcctaccttcaggaaagctatggttgactaattactaatggatgggttttaaacatgtccctctacaataaattaaaatctttcaatgtttgaatataatgtggaggtgtttacctgagggcctctctatctccccgaattc

SEQ ID NO: 1803 - DNA, 794 bp, Homo sapiens
gcctgtaacagaggttatggtgatctgggtggatcccacagatacctcttgcaggagatatttacaagaagttccctgaatctctttccattgtgattttgcattccttagcttatatcctttatattttatgttttcatttgtaaagaaaactaacctgttttctccttttctttctcttccttctttttgcaggaggcattgaaattttcagcagagaccttccaaggacatattgcaggattctgtaatagtgaacatatggaaagtattagaaatatttattgtctgtaaatactgtaaatgcattggaataaaactgtctcccccattgctctatgaaactgcacattggtcattgtgaatatttttttttttgccaaggctaatccaattattattatcacatttaccataatttattttgtccattgatgtatttattttgtaaatgtatcttggtgctgctgaatttctatattttttgtaacataatgcactttagatatacatatcaagtatgttgataaatgacacaatgaagtgtctctattttgtggttgattttaatgaatgcctaaatataattatccaaattgattttcctttgtgcatgtaaaaataacagtattttaaatttgtaaagaatgtctaataaaatataatctaattacatcatgattcagagagtgaattctatcctttaagatttttagtagaaggaacatgatatgtttttttaaaaagcgatttgaatacaatcttaaacacagtatgtttatgttggtacattc

SEQ ID NO: 1804 - DNA, 2060 bp, Homo sapiens
tgttcccagcactcaagccttgccaccgccgagccgggcttcctgggtgtttcaggcaaggaagtctaggtccctggggggtgacccccaaggaaaaggcagcctccctgcgcacccggttgcccggagccctctccagggccggctgggctgggggttgccctggccagcaggggcccgggggcgatgccacccggtgccgactgaggccaccgcaccatggcccgctcgctgacctggcgctgctgcccctggtgcctgacggaggatgagaaggccgccgcccgggtggaccaggagatcaacaggatcctcttggagcagaagaagcaggaccgcggggagctgaagctgctgcttttgggcccaggcgagagcgggaagagcaccttcatcaagcagatgcggatcatccacggcgccggctactcggaggaggagcgcaagggcttccggcccctggtctaccagaacatcttcgtgtccatgcgggccatgatcgaggccatggagcggctgcagattccattcagcaggcccgagagcaagcaccacgctagcctggtcatgagccaggacccctataaagtgaccacgtttgagaagcgctacgctgcggccatgcagtggctgtggagggatgccggcatccgggcctgctatgagcgtcggcgggaattccacctgctcgattcagccgtgtactacctgtcccacctggagcgcatcaccgaggagggctacgtccccacagctcaggacgtgctccgcagccgcatgcccaccactggcatcaacgagtactgcttctccgtgcagaaaaccaacctgcggatcgtggacgtcgggggccagaagtcagagcgtaagaaatggatccattgtttcgagaacgtgatcgccctcatctacctggcctcactgagtgaatacgaccagtgcctggaggagaacaaccaggagaaccgcatgaaggagagcctcgcattgtttgggactatcctggaactaccctggttcaaaagcacatccgtcatcctctttctcaacaaaaccgacatcctggaggagaaaatccccacctcccacctggctacctatttccccagtttccagggccctaagcaggatgctgaggcagccaagaggttcatcctggacatgtacacgaggatgtacaccgggtgcgtggacggccccgagggcagcaagaagggcgcacgatcccgacgccttttcagccactacacatgtgccacagacacacagaacatccgcaaggtcttcaaggacgtgcgggactcggtgctcgcccgctacctggacgagatcaacctgctgtgacccaggccccacctggggcaggcggcaccggcgggcgggtgggaggtgggagtggctgcagggaccctagtgtcctggtctatctctccagcctcggcccacacgcaagggagtcgggggacggcccgctgctggccgctctcttctctgcctctcaccaggacagccgccccccagggtactcctgcccttgcttgactcagtttccctcctttgaaagggaaggagcaaaacggccatttgggatgccagggtggatgaaaaggtgaagaaatcaggggattgagacttgggtgggtgggcatctctcaggagccccatctccgggcgtgtcacctcctgggcagggttctgggaccctctgtgggtgacgcacaccctgggatggggctagtagagccttcaggcgccttcgggcgtggactctggcgcactctagtggacaggagaaggaacgccttccaggaacctgtggactaggggtgcagggacttccctttgcaaggggtaacagaccgctggaaaacactgtcactttcagagctcggtggctcacagcgtgtcctgccccggtttgcggacgagagaaatcgcggcccacaagcatcccccatcccttgcaggctgggggctgggcatgctgcatcttaaccttttgtatttattccctcaccttctgcagggctccgtgcgggctgaaattaaagatttcttag

SEQ ID NO: 1805 - DNA, 8930 bp, Homo sapiens
gaattccggaaagaaagaacatcgtttcaggaataaaaatgcacagtagtagttatagttaccgtagcagtgattctgtgtttagtaacactaccagcactcgaaccagtcttgattcaaatgaaaatcttctcttggttcattgtggtccaacactgatcaactcttgcattagcttcggcagtgaatcctttgatggacacaggttagaaatgttgcaacagattgccaacagagttcagagggacagtgtcatctgtgaagacaaactgattcttgctggaaatgctcttcagtctgattctaaaagattagaatcaggagtgcagtttcagaatgaagcagaaattgctgggtatatacttgaatgtgagaaccttttacgccagcatgtaattgatgtacagattcttattgatggaaaatactaccaggcagatcaattggtacagagggttgcaaaactgcgtgacgaaattatggccttaaggaacgaatgttcttctgtgtacagcaaaggacgcatactgacaacagaacagacaaagctcatgatatcaggaatcactcaaagtttaaactcaggatttgcacagaccttacaccctagtctgacctcagggctgacccagagtttaacaccttccctaacctcttctagtatgacttctggcctgtcatcagggatgacttcccgcctgactccatctgtcactccagcttatacacctggtttcccatcaggattagttccaaatttcagttcaggagtagagccaaattcattgcaaactttgaagttgatgcagatccgaaaaccccttctaaagtcttctttgctggatcaaaatttaacagaagaagaaatcaatatgaaatttgttcaggatcttttgaattgggttgatgagatgcaggtacaactggaccgcactgagtggggctcagatttgccaagtgttgaaagccatttagaaaatcataaaaatgttcatagagctattgaagaatttgaatctagtctcaaagaagctaaaatcagtgagattcaaatgacagcacctcttaaactgacttatgcagaaaagttgcacagattagagagtcagtatgcaaaactcttgaatacatccaggaatcaagaacggcaccttgatacactccataattttgtaagtcgtgcgactaatgaacttatttggttgaatgaaaaagaagaggaggaagttgcttatgactggagtgagagaaacaccaacatagctaggaaaaaagattatcatgctgaattaatgagagaacttgatcaaaaggaagaaaatattaaatcagttcaggagatagcagagcagctacttctagaaaatcatccagcccggttaactattgaggcctacagagcggcaatgcagacgcagtggagctggatcttacagctctgccagtgtgtggagcagcacataaaggagaacacagcgtatttcgagtttttcaatgatgccaaagaagctactgattacttaaggaatctaaaagatgccattcagcggaagtacagctgtgatagatcaagcagcattcacaagctagaagaccttgttcaggaatcaatggaagagaaagaagaacttctgcagtacaaaagcactatagcaaacctaatgggaaaagcaaaaacaataattcaactgaagccaaggaattctgactgtccactcaaaacttctattccgatcaaagctatctgtgactacagacaaattgagataaccatttacaaagacgatgaatgtgttttggcaaataactctcatcgtgctaaatggaaggtcattagtcctactgggaatgaggctatggtcccatctgtgtgcttcaccgttcctccaccaaacaaagaagcggtggaccttgccaacagaattgagcaacagtatcagaatgtcctgactctttggcatgagtctcacataaacatgaagagtgtagtatcctggcattatctcatcaatgaaattgatagaattcgagctagcaatgtggcttcaataaagacaatgctacctggtgaacatcagcaagttctaagtaatctacaatctcgttttgaagattttctggaagatagccaggaatcccaagtcttttcaggctcagatataacacaactggaaaaggaggttaatgtatgtaagcagtattatcaagaacttcttaaatctgcagaaagagaggagcaagaggaatcagtttataatctctacatctctgaagttcgaaacattagacttcggttagagaactgtgaagatcggctgattagacagattcgaactcccctggaaagagatgatttgcatgaaagtgtgttcagaatcacagaacaggagaaactaaagaaagagctggaacgacttaaagatgatttgggaacaatcacaaataagtgtgaggagtttttcagtcaagcagcagcctcttcatcagtccctaccctacgatcagagcttaatgtggtccttcagaacatgaaccaagtctattctatgtcttccacttacatagataagttgaaaactgttaacttggggttaaaaaacactcaagctgcagaagccctcgtaaaactctatgaaactaaactgtgtgaagaagaagcagttatagctgacaagaataatattgagaatctaataagtactttaaagcaatggagatctgaagtagatgaaaagagacaggtattccatgccttagaggatgagttgcagaaagctaaagccatcagtgatgaaatgtttaaaacgtataaagaacgggaccttgattttgactggcacaaagaaaaagcagatcaattagttgaaaggtggcaaaatgttcatgtgcagattgacaacaggttacgggacttagagggcattggcaaatcactgaagtactacagagacacttaccatcctttagatgattggatccagcaggttgaaactactcagagaaagattcaggaaaatcagcctgaaaatagtaaaaccctagccacacagttgaatcaacagaagatgctggtgtccgaaatagaaatgaaacagagcaaaatggacgagtgtcaaaaatatgcagaacagtactcagctacagtgaaggactatgaattacaaacaatgacctaccgggccatggtagattcacaacaaaaatctccagtgaaacgccgaagaatgcagagttcagcagatctcattattcaagagttcatggacctaaggactcgatatactgccctggtcactctcatgacacaatatattaaatttgctggtgattcattgaagaggctggaagaggaggagattaaaaggtgtaaggagacttctgaacatggggcatattcagatctgcttcagcgtcagaaggcaacagtgcttgagaatagcaaacttacaggaaagataagtgagttggaaagaatggtagctgaactaaagaaacaaaagtcccgagtagaggaagaacttccgaaggtcagggaggctgcagaaaatgaattgagaaagcagcagagaaatgtagaagatatctctctgcagaagataagggctgaaagtgaagccaagcagtaccgcagggaacttgaaaccattgtgagagagaaggaagccgctgaaagagaactggagcgggtgaggcagctcaccatagaggccgaggctaaaagagctgccgtggaagagaacctcctgaattttcgcaatcagttggaggaaaacacctttaccagacgaacactggaagatcatcttaaaagaaaagatttaagtctcaatgatttggagcaacaaaaaaataaattaatggaagaattaagaagaaagagagacaatgaggaagaactcttgaagctgataaagcagatggaaaaagaccttgcatttcagaaacaggtagcagagaaacagttgaaagaaaagcagaaaattgaattggaagcaagaagaaaaataactgaaattcagtatacatgtagagaaaatgcattgccagtgtgtccgatcacacaggctacatcatgcagggcagtaacgggtctccagcaagaacatgacaagcagaaagcagaagaactcaaacagcaggtagatgaactaacagctgccaatagaaaggctgaacaagacatgagagagctgacatatgaacttaatgccctccagcttgaaaaaacgtcatctgaggaaaaggctcgtttgctaaaagataaactagatgaaacaaataatacactcagatgccttaagttggagctggaaaggaaggatcaggcggagaaagggtattctcaacaactcagagagcttggtaggcaattgaatcaaaccacaggtaaagctgaagaagccatgcaagaagctagtgatctcaagaaaataaagcgcaattatcagttagaattagaatctcttaatcatgaaaaagggaaactacaaagagaagtagacagaatcacaagggcacatgctgtagctgagaagaatattcagcatttaaattcacaaattcattcttttcgagatgagaaagaattagaaagactacaaatctgccagagaaaatcagatcatctaaaagaacaatttgagaaaagccatgagcagttgcttcaaaatatcaaagctgaaaaagaaaataatgataaaatccaaaggctcaatgaagaattggagaaaagtaatgagtgtgcagagatgctaaaacaaaaagtagaggagcttactaggcagaataatgaaaccaaattaatgatgcagagaattcaggcagaatcagagaatatagttttagagaaacaaactatccagcaaagatgtgaagcactgaaaattcaggcagatggttttaaagatcagctacgcagcacaaatgaacacttgcataaacagacaaaaacagagcaggattttcaaacaaaaattaaatgcctagaagaagacctggcgaaaagtcaaaatttggtaagtgaatttaagcaaaagtgtgaccaacagaacattatcatccagaataccaagaaagaagttagaaatctgaatgcggaactgaatgcttccaaagaagagaagcgacgcggggagcagaaagttcagctacaacaagctcaggtgcaagagttaaataacaggttgaaaaaagtacaagacgaattacacttaaagaccatagaggagcagatgacccacagaaagatggttctgtttcaggaagaatctggtaaattcaaacaatcagcagaggagtttcggaagaagatggaaaaattaatggagtccaaagtcatcactgaaaatgatatttcaggcattaggcttgactttgtgtctcttcaacaagaaaactctagagcccaagaaaatgctaagctttgtgaaacaaacattaaagaacttgaaagacagcttcaacagtatcgtgaacaaatgcagcaagggcagcacatggaagcaaatcattaccaaaaatgtcagaaacttgaggatgagctgatagcccagaagcgtgaggttgaaaacctgaagcaaaaaatggaccaacagatcaaagagcatgaacatcaattagttttgctccagtgtgaaattcaaaaaaagagcacagccaaagactgtaccttcaaaccagattttgagatgacagtgaaggagtgccagcactctggagagctgtcctctagaaacactggacaccttcacccaacacccagatcccctctgttgagatggactcaagaaccacagccattggaagagaagtggcagcatcgggttgttgaacagatacccaaagaagtccaattccagccaccaggggctccactcgagaaagagaaaagccagcagtgttactctgagtacttttctcagacaagcaccgagttacagataacttttgatgagacaaaccccattacaagactgtctgaaattgagaagataagagaccaagccctgaacaattctagaccacctgttaggtatcaagataacgcatgtgaaatggaactggtgaaggttttgacacccttagagatagctaagaacaagcagtatgatatgcatacagaagtcacaacattaaaacaagaaaagaacccagttcccagtgctgaagaatggatgcttgaagggtgcagagcatctggtggactcaagaaaggggatttccttaagaagggcttagaaccagagaccttccagaactttgatggtgatcatgcatgttcagtcagggatgatgaatttaaattccaagggcttaggcacactgtgactgccaggcagttggtggaagctaagcttctggacatgagaacaattgagcagctgcgactcggtcttaagactgttgaagaagttcagaaaactcttaacaagtttctgacgaaagccacctcaattgcagggctttacctagaatctacaaaagaaaagatttcatttgcctcagcggccgagagaatcataatagacaaaatggtggctttggcatttttagaagctcaggctgcaacaggttttataattgatcccatttcaggtcagacatattctgttgaagatgcagttcttaaaggagttgttgaccccgaattcagaattaggcttcttgaggcagagaaggcagctgtgggatattcttattcttctaagacattgtcagtgtttcaagctatggaaaatagaatgcttgacagacaaaaaggtaaacatatcttggaagcccagattgccagtgggggtgtcattgaccctgtgagaggcattcgtgttcctccagaaattgctctgcagcaggggttgttgaataatgccatcttacagtttttacatgagccatccagcaacacaagagttttccctaatcccaataacaagcaagctctgtattactcagaattactgcgaatgtgtgtatttgatgtagagtcccaatgctttctgtttccatttggggagaggaacatttccaatctcaatgtcaagaaaacacatagaatttctgtagtagatactaaaacaggatcagaattgaccgtgtatgaggctttccagagaaacctgattgagaaaactatatatcttgaactttcagggcagcaatatcagtggaaggaagctatgttttttgaatcctatgggcattcttctcatatgctgactgatactaaaacaggattacacttcaatattaatgaggctatagagcagggaacaattgacaaagccttggtcaaaaagtatcaggaaggcctcatcacacttacagaacttgctgattctttgctgagccggttagtccccaagaaagatttgcacagtcctgttgcagggtattggctgactgctagtggggaaaggatctctgtactaaaagcctcccgtagaaatttggttgatcggattactgccctccgatgccttgaagcccaagtcagtacagggggcataattgatcctcttactgtcaaaaagtaccgggtggccgaagctttgcatagaggcctggttgatgaggggtttgcccagcagctgcgacagtgtgaattagtaatcacagggattggccatcccatcactaacaaaatgatgtcagtggtggaagctgtgaaggcaaatattataaataaggaaatgggaatccgatgtttggaatttcagtacttgacaggagggttgatagagccacaggttcactctcggttatcaatagaagaggctctccaagtaggtattatagatgtcctcattgccacaaaactcaaagatcaaaagtcatatgtcagaaatataatatgccctcagacaaaaagaaagttgacatataaagaagccttagaaaaacctgattttgatttccacacaggacttaaactgttagaagtatctgagcccctgatgacaggaatttctagcctctactattcttcctaatgggacatgtttaaataactgtgcaaggggtgatgcaggctggttcatgccactttttcagagtatgatgatatcggctacatatgcagtctgtgaattatgtaacatactctatttcttgagggctgcaaattgctaagtgctcaaaatagagtaagttttaaattgaaaattacataagatttaatgcccttcaaatggtttcatttagccttgagaatggttttttgaaacttggccacactaaaatgtttttttttttacgtagaatgtgggataaacttgatgaactccaagttcacagtgtcatttcttcagaactccccttcattgaatagtgatcatttattaaatgataaattgcactcgctgaaagagcacgtcatgaagcaccatggaatcaaagagaaagatataaattcgttcccacagccttcaagctgcagtgttttagattgcttcaaaaaatgaaaaagttttgcctttttctgtatatagtgaccttctttgcatattaaaatgtttaccacaatgtcccatttctagttaagtcttcgcacttgaaagctaacattatgaatattatgtgttggaggaggggaaggattttcttcattctgtgtattttccttacatgtacagtagacgttctctattctatcagccttctatggtacctttttgtcaggacaattaggattgtaatgctaatgcaaaggcagcaattcaaagatcttctagtgcctcatgaataaagttgagatttaaaatttgtaacattgatggaacagctgggaggttagaccaatcattaaggaatgtatgccatacctttctttgctaccataaacattttggaggtgcatctgctatgtgacatggtaaatatggttaagtgaatgaataaaatgttttagtaacctgtgtcggattccgcggaat

SEQ ID NO: 1806 - DNA, 1764 bp, Homo sapiens; identical to SEQ ID NO: 698

SEQ ID NO: 1807 - DNA, 3336 bp, Homo sapiens
ttttcttagacattaactgcagacggctggcaggatagaagcagcggctcacttggactttttcaccagggaaatcagagacaatgatggggctcttccccagaactacaggggctctggccatcttcgtggtggtcatattggttcatggagaattgcgaatagagactaaaggtcaatatgatgaagaagagatgactatgcaacaagctaaaagaaggcaaaaacgtgaatgggtgaaatttgccaaaccctgcagagaaggagaagataactcaaaaagaaacccaattgccaagattacttcagattaccaagcaacccagaaaatcacctaccgaatctctggagtgggaatcgatcagccgccttttggaatctttgttgttgacaaaaacactggagatattaacataacagctatagtcgaccgggaggaaactccaagcttcctgatcacatgtcgggctctaaatgcccaaggactagatgtagagaaaccacttatactaacggttaaaattttggatattaatgataatcctccagtattttcacaacaaattttcatgggtgaaattgaagaaaatagtgcctcaaactcactggtgatgatactaaatgccacagatgcagatgaaccaaaccacttgaattctaaaattgccttcaaaattgtctctcaggaaccagcaggcacacccatgttcctcctaagcagaaacactggggaagtccgtactttgaccaattctcttgaccgagagcaagctagcagctatcgtctggttgtgagtggtgcagacaaagatggagaaggactatcaactcaatgtgaatgtaatattaaagtgaaagatgtcaacgataacttcccaatgtttagagactctcagtattcagcacgtattgaagaaaatattttaagttctgaattacttcgatttcaagtaacagatttggatgaagagtacacagataattggcttgcagtatatttctttacctctgggaatgaaggaaattggtttgaaatacaaactgatcctagaactaatgaaggcatcctgaaagtggtgaaggctctagattatgaacaactacaaagcgtgaaacttagtattgctgtcaaaaacaaagctgaatttcaccaatcagttatctctcgataccgagttcagtcaaccccagtcacaattcaggtaataaatgtaagagaaggaattgcattccgtcctgcttccaagacatttactgtgcaaaaaggcataagtagcaaaaaattggtggattatatcctgggaacatatcaagccatcgatgaggacactaacaaagctgcctcaaatgtcaaatatgtcatgggacgtaacgatggtggatacctaatgattgattcaaaaactgctgaaatcaaatttgtcaaaaatatgaaccgagattctactttcatagttaacaaaacaatcacagctgaggttctggccatagatgaatacacgggtaaaacttctacaggcacggtatatgttagagtacccgatttcaatgacaattgtccaacagctgtcctcgaaaaagatgcagtttgcagttcttcaccttccgtggttgtctccgctagaacactgaataatagatacactggcccctatacatttgcactggaagatcaacctgtaaagttgcctgccgtatggagtatcacaaccctcaatgctacctcggccctcctcagagcccaggaacagatacctcctggagtataccacatctccctggtacttacagacagtcagaacaatcggtgtgagatgccacgcagcttgacactggaagtctgtcagtgtgacaacaggggcatctgtggaacttcttacccaaccacaagccctgggaccaggtatggcaggccgcactcagggaggctggggcctgccgccatcggcctgctgctccttggtctcctgctgctgctgttggccccccttctgctgttgacctgtgactgtggggcaggttctactgggggagtgacaggtggttttatcccagttcctgatggctcagaaggaacaattcatcagtggggaattgaaggagcccatcctgaagacaaggaaatcacaaatatttgtgtgcctcctgtaacagccaatggagccgatttcatggaaagttctgaagtttgtacaaatacgtatgccagaggcacagcggtggaaggcacttcaggaatggaaatgaccactaagcttggagcagccactgaatctggaggtgctgcaggctttgcaacagggacagtgtcaggagctgcttcaggattcggagcagccactggagttggcatctgttcctcagggcagtctggaaccatgagaacaaggcattccactggaggaaccaataaggactacgctgatggggcgataagcatgaattttctggactcctacttttctcagaaagcatttgcctgtgcggaggaagacgatggccaggaagcaaatgactgcttgttgatctatgataatgaaggcgcagatgccactggttctcctgtgggctccgtgggttgttgcagttttattgctgatgacctggatgacagcttcttggactcacttggacccaaatttaaaaaacttgcagagataagccttggtgttgatggtgaaggcaaagaagttcagccaccctctaaagacagcggttatgggattgaatcctgtggccatcccatagaagtccagcagacaggatttgttaagtgccagactttgtcaggaagtcaaggagcttctgctttgtccgcctctgggtctgtccagccagctgtttccatccctgaccctctgcagcatggtaactatttagtaacggagacttactcggcttctggttccctcgtgcaaccttccactgcaggctttgatccacttctcacacaaaatgtgatagtgacagaaagggtgatctgtcccatttccagtgttcctggcaacctagctggcccaacgcagctacgagggtcacatactatgctctgtacagaggatccttgctcccgtctaatatgaccagaatgagctggaataccacactgaccaaatctggatctttggactaaagtattcaaaatagcatagcaaagctcactgtattgggctaataatttggcacttattagcttctctcataaactgatcacgattataaattaaatgtttgggttcataccccaaaagcaatatgttgtcactcctaattctcaagtactattcaaattgtagtaaatcttaaagtttttcaaaaccctaaaatcatattcgc

SEQ ID NO: 1808 - DNA, 865 bp, Homo sapiens; identical to SEQ ID NO: 1140

SEQ ID NO: 1809 - DNA, 2311 bp, Homo sapiens; identical to SEQ ID NO: 699

SEQ ID NO: 1810 - DNA, 1709 bp, Homo sapiens
caatttgagtttccatttctcggatttgggaactggtataagcattgtctgtgatgtaaacaaagtcttcaatatttggagaaaacatctcctcatacttgagagcacaagaggaagagagagaccctcactgctggggagtccctgccacactcagtcccccaccacactgaatcggaattccgagagggaagaggaggcgcgagaatggaggtggaggccgtctgtggtggcgcgggcgaggtggaggcccaggactctgaccctgcccctgccttcagcaaggcccccggcagcgccggccactacgaactgccgtgggttgaaaaatataggccagtaaagctgaatgaaattgtcgggaatgaagacaccgtgagcaggctagaggtctttgcaagggaaggaaatgtgcccaacatcatcattgcgggccctccaggaaccggcaagaccacaagcattctgtgcttggcccgggccctgctgggcccagcactcaaagatgccatgttggaactcaatgcttcaaatgacaggggcattgacgttgtgaggaataaaattaaaatgtttgctcaacaaaaagtcactcttcccaaaggccgacataagatcatcattctggatgaagcagacagcatgaccgacggagcccagcaagccttgaggagaaccatggaaatctactctaaaaccactcgcttcgcccttgcttgtaatgcttcggataagatcatcgagcccattcagtcccgctgtgcagtcctccggtacacaaagctgaccgacgcccagatcctcaccaggctgatgaatgttatcgagaaggagagggtaccctacactgatgacggcctagaagccatcatcttcacggcccagggagacatgaggcaggcgctgaacaacctgcagtccaccttctcaggatttggcttcattaacagtgagaacgtgttcaaggtctgtgacgagccccacccactgctggtaaaggagatgatccagcactgtgtgaatgccaacattgacgaagcctacaagattcttgctcacttgtggcatctgggctactcaccagaagatatcattggcaacatctttcgagtgtgtaaaactttccaaatggcagaatacctgaaactggagtttatcaaggaaattggatacactcacatgaaaatagcggaaggagtgaactctcttttgcagatggcaggcctcctggcaaggctgtgtcagaagacaatggccccggtggccagttagagcagagacttcactgactgacttacaggtgccctattctgaggtacaggagccgcggctttctgatgggggaaaatgcgccttaggctgagccaacatgactgtcccccaaactccagtggctggccaggcgcggtagtcacgcctgtaatcccaacactttgggaggccgaggcaggtggatcacctgaggtcagaagttcaagaccagcctggccaacatggggaaaccctgtctttactaaaaatataaaaattagctgggtgtggtggcgggcacctgtaatcccagctactcgggaggctgtggcaggcgaaatcgcttgaacccaggaggaggaggtggaggttgcagtgagccaagatcacaccattgcactccagcctgggcgacagagactccatctggggaaaaaaattaaataaataaactcccg

SEQ ID NO: 1811 - DNA, 890 bp, Homo sapiens; identical to SEQ ID NO: 1142

SEQ ID NO: 1812 - DNA, 7941 bp, Homo sapiens
cacacatacgcacgcacgatctcacttcgatctatacactggaggattaaaacaaacaaacaaaaaaaacatttccttcgctccccctccctctccactctgagaagcagaggagccgcacggcgaggggccgcagaccgtctggaaatgcgaatcctaaagcgtttcctcgcttgcattcagctcctctgtgtttgccgcctggattgggctaatggatactacagacaacagagaaaacttgttgaagagattggctggtcctatacaggagcactgaatcaaaaaaattggggaaagaaatatccaacatgtaatagcccaaaacaatctcctatcaatattgatgaagatcttacacaagtaaatgtgaatcttaagaaacttaaatttcagggttgggataaaacatcattggaaaacacattcattcataacactgggaaaacagtggaaattaatctcactaatgactaccgtgtcagcggaggagtttcagaaatggtgtttaaagcaagcaagataacttttcactggggaaaatgcaatatgtcatctgatggatcagagcatagtttagaaggacaaaaatttccacttgagatgcaaatctactgctttgatgcggaccgattttcaagttttgaggaagcagtcaaaggaaaagggaagttaagagctttatccattttgtttgaggttgggacagaagaaaatttggatttcaaagcgattattgatggagtcgaaagtgttagtcgttttgggaagcaggctgctttagatccattcatactgttgaaccttctgccaaactcaactgacaagtattacatttacaatggctcattgacatctcctccctgcacagacacagttgactggattgtttttaaagatacagttagcatctctgaaagccagttggctgttttttgtgaagttcttacaatgcaacaatctggttatgtcatgctgatggactacttacaaaacaattttcgagagcaacagtacaagttctctagacaggtgttttcctcatacactggaaaggaagagattcatgaagcagtttgtagttcagaaccagaaaatgttcaggctgacccagagaattataccagccttcttgttacatgggaaagacctcgagtcgtttatgataccatgattgagaagtttgcagttttgtaccagcagttggatggagaggaccaaaccaagcatgaatttttgacagatggctatcaagacttgggtgctattctcaataatttgctacccaatatgagttatgttcttcagatagtagccatatgcactaatggcttatatggaaaatacagcgaccaactgattgtcgacatgcctactgataatcctgaacttgatcttttccctgaattaattggaactgaagaaataatcaaggaggaggaagagggaaaagacattgaagaaggcgctattgtgaatcctggtagagacagtgctacaaaccaaatcaggaaaaaggaaccccagatttctaccacaacacactacaatcgcatagggacgaaatacaatgaagccaagactaaccgatccccaacaagaggaagtgaattctctggaaagggtgatgttcccaatacatctttaaattccacttcccaaccagtcactaaattagccacagaaaaagatatttccttgacttctcagactgtgactgaactgccacctcacactgtggaaggtacttcagcctctttaaatgatggctctaaaactgttcttagatctccacatatgaacttgtcggggactgcagaatccttaaatacagtttctataacagaatatgaggaggagagtttattgaccagtttcaagcttgatactggagctgaagattcttcaggctccagtcccgcaacttctgctatcccattcatctctgagaacatatcccaagggtatatattttcctccgaaaacccagagacaataacatatgatgtccttataccagaatctgctagaaatgcttccgaagattcaacttcatcaggttcagaagaatcactaaaggatccttctatggagggaaatgtgtggtttcctagctctacagacataacagcacagcccgatgttggatcaggcagagagagctttctccagactaattacactgagatacgtgttgatgaatctgagaagacaaccaagtccttttctgcaggcccagtgatgtcacagggtccctcagttacagatctggaaatgccacattattctacctttgcctacttcccaactgaggtaacacctcatgcttttaccccatcctccagacaacaggatttggtctccacggtcaacgtggtatactcgcagacaacccaaccggtatacaatggtgagacacctcttcaaccttcctacagtagtgaagtctttcctctagtcacccctttgttgcttgacaatcagatcctcaacactacccctgctgcttcaagtagtgattcggccttgcatgctacgcctgtatttcccagtgtcgatgtgtcatttgaatccatcctgtcttcctatgatggtgcacctttgcttccattttcctctgcttccttcagtagtgaattgtttcgccatctgcatacagtttctcaaatccttccacaagttacttcagctaccgagagtgataaggtgcccttgcatgcttctctgccagtggctgggggtgatttgctattagagcccagccttgctcagtattctgatgtgctgtccactactcatgctgcttcagagacgctggaatttggtagtgaatctggtgttctttataaaacgcttatgttttctcaagttgaaccacccagcagtgatgccatgatgcatgcacgttcttcagggcctgaaccttcttatgccttgtctgataatgagggctcccaacacatcttcactgtttcttacagttctgcaatacctgtgcatgattctgtgggtgtaacttatcagggttccttatttagcggccctagccatataccaatacctaagtcttcgttaataaccccaactgcatcattactgcagcctactcatgccctctctggtgatggggaatggtctggagcctcttctgatagtgaatttcttttacctgacacagatgggctgacagcccttaacatttcttcacctgtttctgtagctgaatttacatatacaacatctgtgtttggtgatgataataaggcgctttctaaaagtgaaataatatatggaaatgagactgaactgcaaattccttctttcaatgagatggtttacccttctgaaagcacagtcatgcccaacatgtatgataatgtaaataagttgaatgcgtctttacaagaaacctctgtttccatttctagcaccaagggcatgtttccagggtcccttgctcataccaccactaaggtttttgatcatgagattagtcaagttccagaaaataacttttcagttcaacctacacatactgtctctcaagcatctggtgacacttcgcttaaacctgtgcttagtgcaaactcagagccagcatcctctgaccctgcttctagtgaaatgttatctccttcaactcagctcttattttatgagacctcagcttcttttagtactgaagtattgctacaaccttcctttcaggcttctgatgttgacaccttgcttaaaactgttcttccagctgtgcccagtgatccaatattggttgaaacccccaaagttgataaaattagttctacaatgttgcatctcattgtatcaaattctgcttcaagtgaaaacatgctgcactctacatctgtaccagtttttgatgtgtcgcctacttctcatatgcactctgcttcacttcaaggtttgaccatttcctatgcaagtgagaaatatgaaccagttttgttaaaaagtgaaagttcccaccaagtggtaccttctttgtacagtaatgatgagttgttccaaacggccaatttggagattaaccaggcccatcccccaaaaggaaggcatgtatttgctacacctgttttatcaattgatgaaccattaaatacactaataaataagcttatacattccgatgaaattttaacctccaccaaaagttctgttactggtaaggtatttgctggtattccaacagttgcttctgatacatttgtatctactgatcattctgttcctataggaaatgggcatgttgccattacagctgtttctccccacagagatggttctgtaacctcaacaaagttgctgtttccttctaaggcaacttctgagctgagtcatagtgccaaatctgatgccggtttagtgggtggtggtgaagatggtgacactgatgatgatggtgatgatgatgatgacagagatagtgatggcttatccattcataagtgtatgtcatgctcatcctatagagaatcacaggaaaaggtaatgaatgattcagacacccacgaaaacagtcttatggatcagaataatccaatctcatactcactatctgagaattctgaagaagataatagagtcacaagtgtatcctcagacagtcaaactggtatggacagaagtcctggtaaatcaccatcagcaaatgggctatcccaaaagcacaatgatggaaaagaggaaaatgacattcagactggtagtgctctgcttcctctcagccctgaatctaaagcatgggcagttctgacaagtgatgaagaaagtggatcagggcaaggtacctcagatagccttaatgagaatgagacttccacagatttcagttttgcagacactaatgaaaaagatgctgatgggatcctggcagcaggtgactcagaaataactcctggattcccacagtccccaacatcatctgttactagcgagaactcagaagtgttccacgtttcagaggcagaggccagtaatagtagccatgagtctcgtattggtctagctgaggggttggaatccgagaagaaggcagttataccccttgtgatcgtgtcagccctgacttttatctgtctagtggttcttgtgggtattctcatctactggaggaaatgcttccagactgcacacttttacttagaggacagtacatcccctagagttatatccacacctccaacacctatctttccaatttcagatgatgtcggagcaattccaataaagcactttccaaagcatgttgcagatttacatgcaagtagtgggtttactgaagaatttgagacactgaaagagttttaccaggaagtgcagagctgtactgttgacttaggtattacagcagacagctccaaccacccagacaacaagcacaagaatcgatacataaatatcgttgcctatgatcatagcagggttaagctagcacagcttgctgaaaaggatggcaaactgactgattatatcaatgccaattatgttgatggctacaacagaccaaaagcttatattgctgcccaaggcccactgaaatccacagctgaagatttctggagaatgatatgggaacataatgtggaagttattgtcatgataacaaacctcgtggagaaaggaaggagaaaatgtgatcagtactggcctgccgatgggagtgaggagtacgggaactttctggtcactcagaagagtgtgcaagtgcttgcctattatactgtgaggaattttactctaagaaacacaaaaataaaaaagggctcccagaaaggaagacccagtggacgtgtggtcacacagtatcactacacgcagtggcctgacatgggagtaccagagtactccctgccagtgctgacctttgtgagaaaggcagcctatgccaagcgccatgcagtggggcctgttgtcgtccactgcagtgctggagttggaagaacaggcacatatattgtgctagacagtatgttgcagcagattcaacacgaaggaactgtcaacatatttggcttcttaaaacacatccgttcacaaagaaattatttggtacaaactgaggagcaatatgtcttcattcatgatacactggttgaggccatacttagtaaagaaactgaggtgctggacagtcatattcatgcctatgttaatgcactcctcattcctggaccagcaggcaaaacaaagctagagaaacaattccagctcctgagccagtcaaatatacagcagagtgactattctgcagccctaaagcaatgcaacagggaaaagaatcgaacttcttctatcatccctgtggaaagatcaagggttggcatttcatccctgagtggagaaggcacagactacatcaatgcctcctatatcatgggctattaccagagcaatgaattcatcattacccagcaccctctccttcataccatcaaggatttctggaggatgatatgggaccataatgcccaactggtggttatgattcctgatggccaaaacatggcagaagatgaatttgtttactggccaaataaagatgagcctataaattgtgagagctttaaggtcactcttatggctgaagaacacaaatgtctatctaatgaggaaaaacttataattcaggactttatcttagaagctacacaggatgattatgtacttgaagtgaggcactttcagtgtcctaaatggccaaatccagatagccccattagtaaaacttttgaacttataagtgttataaaagaagaagctgccaatagggatgggcctatgattgttcatgatgagcatggaggagtgacggcaggaactttctgtgctctgacaacccttatgcaccaactagaaaaagaaaattccgtggatgtttaccaggtagccaagatgatcaatctgatgaggccaggagtctttgctgacattgagcagtatcagtttctctacaaagtgatcctcagccttgtgagcacaaggcaggaagagaatccatccacctctctggacagtaatggtgcagcattgcctgatggaaatatagctgagagcttagagtctttagtttaacacagaaaggggtggggggactcacatctgagcattgttttcctcttcctaaaattaggcaggaaaatcagtctagttctgttatctgttgatttcccatcacctgacagtaactttcatgacataggattctgccgccaaatttatatcattaacaatgtgtgcctttttgcaagacttgtaatttacttattatgtttgaactaaaatgattgaattttacagtatttctaagaatggaattgtggtatttttttctgtattgattttaacagaaaatttcaatttatagaggttaggaattccaaactacagaaaatgtttgtttttagtgtcaaatttttagctgtatttgtagcaattatcaggtttgctagaaatataacttttaatacagtagcctgtaaataaaacactcttccatatgatattcaacattttacaactgcagtattcacctaaagtagaaataatctgttacttattgtaaatactgccctagtgtctccatggaccaaatttatatttataattgtagatttttatattttactactgagtcaagttttctagttctgtgtaattgtttagtttaatgacgtagttcattagctggtcttactctaccagttttctgacattgtattgtgttacctaagtcattaactttgtttcagcatgtaattttaacttttgtggaaaatagaaataccttcattttgaaagaagtttttatgagaataacaccttaccaaacattgttcaaatggtttttatccaaggaattgcaaaaataaatataaatattgccattaaaaaaaaaaaaaaaaaaaaaaaaaaaaaaaaaaa

SEQ ID NO: 1813 - DNA, 2566 bp, Homo sapiens
ggcacgagttgtgctcctcgcttgcctgttccttttccacgcattttccaggataactgtgactccaggcccgcaatggatgccctgcaactagcaaattcggcttttgccgttgatctgttcaaacaactatgtgaaaaggagccactgggcaatgtcctcttctctccaatctgtctctccacctctctgtcacttgctcaagtgggtgctaaaggtgacactgcaaatgaaattggacaggttcttcattttgaaaatgtcaaagatataccctttggatttcaaacagtaacatcggatgtaaacaaacttagttccttttactcactgaaactaatcaagcggctctacgtagacaaatctctgaatctttctacagagttcatcagctctacgaagagaccctatgcaaaggaattggaaactgttgacttcaaagataaattggaagaaacgaaaggtcagatcaacaactcaattaaggatctcacagatggccactttgagaacattttagctgacaacagtgtgaacgaccagaccaaaatccttgtggttaatgctgcctactttgttggcaagtggatgaagaaatttcctgaatcagaaacaaaagaatgtcctttcagactcaacaagacagacaccaaaccagtgcagatgatgaacatggaggccacgttctgtatgggaaacattgacagtatcaattgtaagatcatagagcttccttttcaaaataagcatctcagcatgttcatcctactacccaaggatgtggaggatgagtccacaggcttggagaagattgaaaaacaactcaactcagagtcactgtcacagtggactaatcccagcaccatggccaatgccaaggtcaaactctccattccaaaatttaaggtggaaaagatgattgatcccaaggcttgtctggaaaatctagggctgaaacatatcttcagtgaagacacatctgatttctctggaatgtcagagaccaagggagtggccctatcaaatgttatccacaaagtgtgcttagaaataactgaagatggtggggattccatagaggtgccaggagcacggatcctgcagcacaaggatgaattgaatgctgaccatccctttatttacatcatcaggcacaacaaaactcgaaacatcattttctttggcaaattctgttctccttaagtggcatagcccatgttaagtcctccctgacttttctgtggatgccgatttctgtaaactctgcatccagagattcattttctagatacaataaattgctaatgttgctggatcaggaagccgccagtacttgtcatatgtagccttcacacagatagacctttttttttttccaattctatcttttgtttccttttttcccataagacaatgacatacgcttttaatgaaaaggaatcacgttagaggaaaaatatttattcattatttgtcaaattgtccggggtagttggcagaaatacagtcttccacaaagaaaattcctataaggaagatttggaagctcttcttcccagcactatgctttccttctttgggatagagaatgttccagacattctcgcttccctgaaagactgaagaaagtgtagtgcatgggacccacgaaactgccctggctccagtgaaacttgggcacatgctcaggctactataggtccagaagtccttatgttaagccctggcaggcaggtgtttattaaaattctgaattttggggattttcaaaagataatattttacatacactgtatgttatagaacttcatggatcagatctggggcagcaacctataaatcaacaccttaatatgctgcaacaaaatgtagaatattcagacaaaatggatacataaagactaagtagcccataaggggtcaaaatttgctgccaaatgcgtatgccaccaacttacaaaaacacttcgttcgcagagcttttcagattgtggaatgttggataaggaattatagacctctagtagctgaaatgcaagaccccaagaggaagttcagatcttaatataaattcactttcatttttgatagctgtcccatctggtcatgtggttggcactagactggtggcaggggcttctagctgactcgcacagggattctcacaatagccgatatcagaatttgtgttgaaggaacttgtctcttcatctaatatgatagcgggaaaaggagaggaaactactgcctttagaaaatataagtaaagtgattaaagtgctcacgttaccttgacacatagtttttcagtctatgggtttagttactttagatggcaagcatgtaacttatattaatagtaatttgtaaagttgggtggataagctatccctgttgccggttcatggattacttctctataaaaaatatatatttaccaaaaaattttgtgacattccttctcccatctcttccttgacatgcattgtaaataggttcttcttgttctgagattcaatattgaatttctcctatgctattgacaataaaatattattgaactacc

SEQ ID NO: 1814 - DNA, 1388 bp, Homo sapiens; identical to SEQ ID NO: 1149

SEQ ID NO: 1815 - DNA, 1005 bp, Homo sapiens
  misc_feature: n=a,t,g or c
ngggtttacgcagcncnccaagaggnttgnaccncgcgatccaagagggatttaagcagcccagagctccagagaaaaagagagcgagaaagaaccacacacagagacggcttaagcgtttacccgaattaaatatatatttttaaaaagaactgttgagttttatcattttcgttaagtgaccgtgcgcagcgctgtaactgcaggatggggaagcagaatagcaaactggcccctgaagtgatggaggacctggtgaagagcacagagtttaatgagcatgaactcaagcagtggtacaaaggatttctcaaggactgtccaagtgggaggctaaatctcgaggaatttcagcagctctatgtgaagttctttccttatggagacgcctccaagtttggccagcatgccttccgaaccttcgacaagattggggacggcaccattgacttccgagagttcatctgcgctctgtccatcacctccaggggnagntttgagcagaagctgaactgggccttcaatatgtatgacctggatggtgatggcaagatcacccnnntggagatgctggagatcatcgaggctatctacaaaatggtaggcactgtgatcatgatgaaaatgaatgaggatggcctgacgcctgagcagcgagtagacaagattttcagcaagatggatangaacaaagatgaccagattacactgggtgaattcagagaagctgcaaagagcgacccttccattgtattacttctccagtgcgacatccagaaatgagctgatgtcaatgctatgggctncncccaagtctcnatgttccattcagtctgcagctattcacacacacacacacacacacacacacacacacacacacacacacacncaaatattgcttggnctacctataaatggacttgcttcttgtgtttgaaacactcgtgtgcatgagaatgtcatttgctaatgaattttaaaagcatacaancaccngccaag

SEQ ID NO: 1816 - DNA, 3111 bp, Homo sapiens
ggagtgcggggcgcccggcgccaggggagccgccacagccatggattgcaaagatagaccagcttttccagttaagaagttaatacaagcccgtctgccgtttaagcgcctgaatcttgtcccaaaggggaaagccgatgacatgtcagacgatcagggtacttctgtgcaaagtaaaagccccgatttagaggcctctttggacaccttggaaaacaactgtcatgtgggttctgacatagactttagaccgaaacttgtcaacgggaagggtcccttagataactttttaagaaatagaatcgaaaccagtattggccagagcacagtcatcattgatttgacagaggactcgaatgagcagccagacagtcttgtggaccacaataaactaaattctgaagcctctccctccagggaggcaataaatggccagcgagaagacactggggatcagcaggggttgttgaaggccattcagaacgacaagttggcatttcctggagagaccctttcagacattccttgcaaaacagaggaggagggtgttggctgtggaggtgcagggaggagaggcgactcccaggaatgttcgccacggagctgcccggagctgacgagtggcccgagaatgtgccccagaaaggagcaggacagttggagtgaagctgggggcatcctgttcaaagggaaggtgcctatggtggtcttgcaggacatcttggctgtgagaccaccgcaaatcaagtcccttccagccacaccccaaggcaagaacatgacccctgagagtgaggtgctggaatctttccccgaagaagactctgtactcagccattcgtccctgagctctccctcttccaccagctcgcccgaggggccgcctgctcccccaaagcagcacagcagtaccagtcccttccccacctccacgcccctccgcagaataactaagaaattcgtcaaaggctctacagagaagaacaagctcagactgcaaagagatcaggagcgtctgggcaagcagctcaagttacgtgcagaaagggaagaaaaggagaagctgaaagaggaggccaagcgggccaaggaggaggccaagaagaagaaggaggaagagaaggagcttaaggaaaaggagaggcgggagaagcgggagaaggatgagaaggagaaggcggagaagcagcggctcaaggaggagcggcgcaaggagagacaggaagccctggaggctaaacttgaggaaaaaaggaaaaaggaagaagagaaacggttaagagaagaagagaagcgcattaaagcagagaaggccgaaatcacgaggttcttccagaaaccaaagactccacaggcccccaagaccctggccggctcctgtgggaagtttgccccctttgaaattaaagagcacatggtcctggcccctcggcgtcggaccgctttccatccagacctctgcagtcagctggaccagctcctccagcagcagagcggcgagttctccttcttgaaagacctcaaaggccggcagcccctgaggtccggacccacgcacgtttccacccggaatgcagatatttttaacagtgatgtcgtcatcgtggagcgtgggaagggcgacggtgttcccgagaggaggaagtttggcaggatgaagctcctgcagttctgtgagaaccaccggcctgcctactggggtacctggaataagaagacggcactcatccgcgcgcgagacccctgggcccaggacacgaagctcctggactatgaggtggacagtgatgaggagtgggaagaagaggagcctggggagtccctgtcccacagtgagggggatgatgatgacgacatgggagaggatgaagatgaggacgatggtttctttgtgccccatgggtacctgtctgaggacgaaggtgtgacagaggagtgtgccgaccctgagaaccataaggtccgccagaaactgaaggccaaggagtgggacgagttcctggctaaggggaagcgctttcgcgtcctgcaacctgtgaagatcggctgcgtgtgggcggctgacagagactgcgcaggcgatgacctgaaggtactgcagcagttcgcagcctgcttcctggagaccctgccggcccaggaggagcagacgcccaaggcctccaagcgggagaggagagacgagcagatcctggcccagctgctgccgctcctgcacggcaatgtgaacgggagcaaggtcatcatccgggagttccaggagcactgccgccggggactgctcagcaaccacaccggcagcccgcggacgccctccaccacctacctgcacacccccacccccagcgaggatgccgccatcccctctaagtcccggctcaagcggctcatttccgagaactcagtgtatgagaagcggcctgacttcaggatgtgctggtacgtgcacccgcaggtgctacagagcttccagcaggagcacctgcccgtgccgtgccagtggagctatgtgacatcggtgccctcggcccccaaagaggacagtggcagcgtcccctccacggggcccagccagggcactcccatctcgctgaagaggaagtcagcgggcagcatgtgcatcacccaattcatgaagaagcgcaggcacgacggccagattggtgctgaagacatggacggcttccaggcagacacggaggaggaggaagaggaggagggcgactgtatgatcgtggatgtcccggatgctgtggaggtccaagccccgtgtggagccgcttccggagctgggggtggtgtgggggtggacaccggcaaggccaccctgaccgcgagcccactgggtgcatcctgagagcaggggtgacgtatgtagaacgcttagggtgtcctccccacagagcagatacttgaaccgactcaattcctgtgtaaagagcactttgtcctgcttcacggacctccccaaagtgtgcagagttctatataggatgctggattagttcctttgatatttgtaaaaattcccccaagagccgcatatgaatctgccctttaataaagcattattgagattgctggcctattggggaagctgcgggcacagga

SEQ ID NO: 1817 - DNA, 1167 bp, Homo sapiens
atgggggacgctcccagccctgaagagaaactgcaccttatcacccggaacctgcaggaggttctgggggaagagaagctgaaggagatactgaaggagcgggaacttaaaatttactggggaacggcaaccacgggcaaaccacatgtggcttactttgtgcccatgtcaaagattgcagacttcttaaaggcagggtgtgaggtaacaattctgtttgcggacctccacgcatacctggataacatgaaagccccatgggaacttctagaactccgagtcagttactatgagaatgtgatcaaagcaatgctggagagcattggtgtgcccttggagaagctcaagttcatcaaaggcactgattaccagctcagcaaagagtacacactagatgtgtacagactctcctccgtggtcacacagcacgattccaagaaggctggagctgaggtggtaaagcaggtggagcaccctttgctgagtggcctcttataccccggactgcaggctttggatgaagagtatttaaaagtagatgcccaatttggaggcattgatcagagaaagattttcacctttgcagagaagtacctccctgcacttggctattcaaaacgggtccatctgatgaatcctatggttccaggattaacaggcagcaaaatgagctcttcagaagaggagtccaagattgatctccttgatcggaaggaggatgtgaagaaaaaactgaagaaggccttctgtgagccaggaaatgtggagaacaatggggttctgtccttcatcaagcatgtcctttttccccttaagtccgagtttgtgatcctacgagatgagaaatggggtggaaacaaaacctacacagcttacgtggacctggaaaaggactttgctgctgaggttgtacatcctggagacctgaagaattctgttgaagtcgcactgaacaagttgctggatccaatccgggaaaagtttaatacccctgccctgaaaaaactggccagcgctgcctacccagatccctcaaagcagaagccaatggccaaaggcctgccaagaattcagaaccagaggaggtcatcccatcccggctggatatccgtgtggggaaaatcatcactgtggagaagcacccagatgcagacagcctgtatgtag

SEQ ID NO: 1818 - DNA, 2442 bp, Homo sapiens; identical to SEQ ID NO: 705

SEQ ID NO: 1819 - DNA, 2303 bp, Homo sapiens
cccggcgtcccgtcgagcccagccccgccgggggcgctcctcgccgcccgcacgccctccccagccatgtcgtccatcctgcctttcactcccccgatcgtgaagcgcctgctgggctggaagaagggcgagcagaacgggcaggaggagaaatggtgcgagaaggcggtcaagagcctggtcaagaaactcaagaagacggggcagctggacgagctggagaaggccatcaccacgcagaacgtcaacaccaagtgcatcaccatccccaggtccctggatggccggttgcaggtgtcccatcggaaggggctccctcatgtcatctactgccgcctgtggcgatggccagacctgcacagccaccacgagctgcgggccatggagctgtgtgagttcgccttcaatatgaagaaggacgaggtctgcgtgaatccctaccactaccagagagtagagacaccagttctacctcctgtgttggtgccacgccacacagagatcccggccgagttccccccactggacgactacagccattccatccccgaaaacactaacttccccgcaggcatcgagccccagagcaatattccagagaccccaccccctggctacctgagtgaagatggagaaaccagtgaccaccagatgaaccacagcatggacgcaggttctccaaacctatccccgaatccgatgtccccagcacataataacttggacctgcagccagttacctactgcgagccggccttctggtgctccatctcctactacgagctgaaccagcgcgtcggggagacattccacgcctcgcagccatccatgactgtggatggcttcaccgacccctccaattcggagcgcttctgcctagggctgctctccaatgtcaacaggaatgcagcagtggagctgacacggagacacatcggaagaggcgtgcggctctactacatcggaggggaggtcttcgcagagtgcctcagtgacagcgctatttttgtccagtctcccaactgtaaccagcgctatggctggcacccggccaccgtctgcaagatcccaccaggatgcaacctgaagatcttcaacaaccaggagttcgctgccctcctggcccagtcggtcaaccagggctttgaggctgtctaccagttgacccgaatgtgcaccatccgcatgagcttcgtcaaaggctggggagcggagtacaggagacagactgtgaccagtaccccctgctggattgagctgcacctgaatgggcctttgcagtggcttgacaaggtcctcacccagatgggctccccaagcatccgctgttccagtgtgtcttagagacatcaagtatggtaggggagggcaggcttggggaaaatggccatacaggaggtggagaaaattggaactctactcaacccattgttgtcaaggaagaagaaatctttctccctcaactgaaggggtgcacccacctgttttctgaaacacacgagcaaacccagaggtggatgttatgaacagctgtgtctgccaaacacatttaccctttggccccactttgaagggcaagaaatggcgtctgctctggtggcttaagtgagcagaacaggtagtattacaccaccggcaccctccccccagactctttttttgagtgacagctttctgggatgtcacagtccaaccagaaacgcccctctgtctaggactgcagtgtggagttcaccttggaagggcgttctaggtaggaagagcccgcacgatgcagacctcatgcccagctctctgacgcttgtgacagtgcctcttccagtgaacattcccagcccagccccgccccgttgtgagctggatagacttgggatggggagggagggagttttgtctgtctccctcccctctcagaacatactgattgggaggtgcgtgttcagcagaacctgcacacaggacagcgggaaaaatcgatgagcgccacctctttaaaaactcacttacgttgtcctttttcactttgaaaagttggaaggactgctgaggcccagtgcatatgcaatgtatagtgtctattatcacattaatctcaaagagattcgaatgacggtaagtgttctcatgaagcaggaggcccttgtcgtgggatggcatttggtctcaggcagcaccacactgggtgcgtctccagtcatctgtaagagcttgctccagattctgatgcatacggctatattggtttatgtagtcagttgcattcattaaatcaactttatcatatgctcaaaaaaaaaaaaaag

SEQ ID NO: 1820 - DNA, 3492 bp, Homo sapiens; identical to SEQ ID NO: 78

SEQ ID NO: 1821 - DNA, 1579 bp, Homo sapiens
aaaacactaaggggagcgcgcgaagctgaacttggcgctcgatgggggccgttagccgccctagagcgcgcggagccgcagaggcgtagctggactacaacgcagtgcatctcgggaggccaactcgactggactgggtgagaggacagaggtggctcgatgggcggcccgaaggccggggatcatggcgggaaggcgggcccagccaggttcagccccgccccgacccgccgctccccacccccggccggcctcgcgtgccttcccgcagcactgccgtccccgggatgctgagcgcccaccgtctccccgcagccccctcatgcccggctgcgagctgcccgtgggcacctgcccggacatgtgcccggccgccgagcgcgcccagcgcgaaagggagcaccgcctgcaccgcttggaggtggtgccgggttgccgccaggacccgccccgcgcggatccgcagcgcgcggtgaaggagtacagccgacccgccgccggcaagccccggcccccgcccagccagttgcgtccgccctccgtgctgctggccaccgtgcgctacctggccggtgaggtggcggagagcgccgacatcgcccgcgccgaggtggccagcttcgtggcagaccgcttgcgagctgtgcgcctggacctggcgctgcagggagcgggcgacgccgaggcagcggtggtgctggaggcggcgctggccacgctgctggccgtagtggcgcggctcgggcccgacgcggcgcggggacccgcggacccggtgctgctgcaggcccaggtgcaggagggcttcggctcgctgcggcgctgctacgcgcggggcgccgggccgcacccccgccaacccgccttccagggcctctttctgctctataacctgggtgagtcgggatcctggcggctgggcagagcgtggggacaggagcccaccatgacagtggaggctcggtggaagccctgcatgaggttctacagctgcctgctgccctgcgcgcctgcccgcccctccgcaaggccttggcggtagatgctgccttccgagagggcaatgctgcccgcctgttccgtctgctccagaccctgccctacctgccaagttgcgctgtgcagtgccatgtgggccatgcccgccgggaagccctggcccgcttcgctcgtgcctttagcacccccaagggccagaccttgcctctgggcttcatggtcaacctcttggccctggatggactcagggaagcacgggacctgtgccaggcccacgggctgcccttggacggagaggagagagttgtgttcctgaggggtcgctacgtggaggaagggctaccgcctgccagtacgtgcaaggtgttagtggagagcaaacttcgaggacgtaccctggaggaggtggtcatggcagaggaggaagatgagggcacggacagacctgggtccccagcctgaggagggagcgtgagcctcccagagccccaggactgggccagagcacttaggtttctttttccatggtttccaggtaataaaaggaacttgttttgttggtaaaaaaaaaaaaaaaaaa

SEQ ID NO: 1822 - DNA, 1026 bp, Homo sapiens
cagcatgttgagccgggcagtgtgcggcaccagcaggcagctgcctccggttttggggtatctgggctccaggcagaagcacagcctccccgacctgccctacgactacggcgccctggaacctcacatcaacgcgcagatcatgcagctgcaccacagcaagcaccacgcggcctacgtgaacaacctgaacgtcaccgaggagaagtaccaggaggcgttggccaagggagatgttacagcccagatagctcttcagcctgcactgaagttcaatggtggtggtcatatcaatcatagcattttctggacaaacctcagccctaacggtggtggagaacccaaaggggagttgctggaagccatcaaactggactttggttcctttgacaagtttaaggagaagctgacggctgcatctgttggtgtccaaggctcaggttggggttggcttggtttcaataaggaacggggacacttacaaattgctgcttgtccaaatcaggatccactgcaaggaacaacaggccttattccactgctggggattgatgtgtgggagcacgcttactaccttcagtataaaaatgtcaggcctgattatctaaaagctatttggaatgtaatcaactgggagaatgtaactgaaagatacatggcttgcaaaaagtaaaccacgatcgttatgctgagtatgttaagctctttatgactgtttttgtagtggtatagagtactgcagaatacagtaagctgctctattgtagcatttcttgatgttgcttagtcacttatttcataaacaacttaatgttctgaataatttcttactaaacattttgttattgggcaagtgattgaaaatagtaaatgctttgtgtgattgaatctgattggacattttcttcagagagctaaattacaattgtcatttataaaaccatcaaaaatattccatccatatactttggggacttgtagggatgcctttctagtcctattctattgcagttatagaaaatctag

SEQ ID NO: 1823 - DNA, 2627 bp, Homo sapiens; identical to SEQ ID NO: 85

SEQ ID NO: 1824 - DNA, 1878 bp, Homo sapiens
gggcgcagcggggcccgtctgcagcaagtgaccgacggccgggacggccgcctgccccctctgccacctggggcggtgcgggcccggagcccggagcccgggtagcgcgtagagccggcgcgatgcacgtgcgctcactgcgagctgcggcgccgcacagcttcgtggcgctctgggcacccctgttcctgctgcgctccgccctggccgacttcagcctggacaacgaggtgcactcgagcttcatccaccggcgcctccgcagccaggagcggcgggagatgcagcgcgagatcctctccattttgggcttgccccaccgcccgcgcccgcacctccagggcaagcacaactcggcacccatgttcatgctggacctgtacaacgccatggcggtggaggagggcggcgggcccggcggccagggcttctcctacccctacaaggccgtcttcagtacccagggcccccctctggccagcctgcaagatagccatttcctcaccgacgccgacatggtcatgagcttcgtcaacctcgtggaacatgacaaggaattcttccacccacgctaccaccatcgagagttccggtttgatctttccaagatcccagaaggggaagctgtcacggcagccgaattccggatctacaaggactacatccgggaacgcttcgacaatgagacgttccggatcagcgtttatcaggtgctccaggagcacttgggcagggaatcggatctcttcctgctcgacagccgtaccctctgggcctcggaggagggctggctggtgtttgacatcacagccaccagcaaccactgggtggtcaatccgcggcacaacctgggcctgcagctctcggtggagacgctggatgggcagagcatcaaccccaagttggcgggcctgattgggcggcacgggccccagaacaagcagcccttcatggtggctttcttcaaggccacggaggtccacttccgcagcatccggtccacggggagcaaacagcgcagccagaaccgctccaagacgcccaagaaccaggaagccctgcggatggccaacgtggcagagaacagcagcagcgaccagaggcaggcctgtaagaagcacgagctgtatgtcagcttccgagacctgggctggcaggactggatcatcgcgcctgaaggctacgccgcctactactgtgagggggagtgtgccttccctctgaactcctacatgaacgccaccaaccacgccatcgtgcagacgctggtccacttcatcaacccggaaacggtgcccaagccctgctgtgcgcccacgcagctcaatgccatctccgtcctctacttcgatgacagctccaacgtcatcctgaagaaatacagaaacatggtggtccgggcctgtggctgccactagctcctccgagaattcagaccctttggggccaagtttttctggatcctccattgctcgccttggccaggaaccagcagaccaactgccttttgtgagaccttcccctccctatccccaactttaaaggtgtgagagtattaggaaacatgagcagcatatggcttttgatcagtttttcagtggcagcatccaatgaacaagatcctacaagctgtgcaggcaaaacctagcaggaaaaaaaaacaacgcataaagaaaaatggccgggccaggtcattggctgggaagtctcagccatgcacggactcgtttccagaggtaattatgagcgcctaccagccaggccacccagccgtgggaggaagggggcgtggcaaggggtgggcacattggtgtctgtgcgaaaggaaaattgacccggaagttcctgtaataaatgtcacaataaaacgaatgaatg

SEQ ID NO: 1825 - DNA, 5994 bp, Homo sapiens; identical to SEQ ID NO: 721

SEQ ID NO: 1826 - DNA, 1970 bp, Homo sapiens
atattggagtagcaagaggctgggaagccatcacttaccttgcactgagaaagaagacaaaggccagtatgcacagctttcctccactgctgctgctgctgttctggggtgtggtgtctcacagcttcccagcgactctagaaacacaagagcaagatgtggacttagtccagaaatacctggaaaaatactacaacctgaagaatgatgggaggcaagttgaaaagcggagaaatagtggcccagtggttgaaaaattgaagcaaatgcaggaattctttgggctgaaagtgactgggaaaccagatgctgaaaccctgaaggtgatgaagcagcccagatgtggagtgcctgatgtggctcagtttgtcctcactgaggggaaccctcgctgggagcaaacacatctgacctacaggattgaaaattacacgccagatttgccaagagcagatgtggaccatgccattgagaaagccttccaactctggagtaatgtcacacctctgacattcaccaaggtctctgagggtcaagcagacatcatgatatcttttgtcaggggagatcatcgggacaactctccttttgatggacctggaggaaatcttgctcatgcttttcaaccaggcccaggtattggaggggatgctcattttgatgaagatgaaaggtggaccaacaatttcagagagtacaacttacatcgtgttgcggctcatgaactcggccattctcttggactctcccattctactgatatcggggctttgatgtaccctagctacaccttcagtggtgatgttcagctagctcaggatgacattgatggcatccaagccatatatggacgttcccaaaatcctgtccagcccatcggcccacaaaccccaaaagcatgtgacagtaagctaacctttgatgctataactacgattcggggagaagtgatgttctttaaagacagattctacatgcgcacaaatcccttctacccggaagttgagctcaatttcatttctgttttctggccacaactgccaaatgggcttgaagctgcttacgaatttgccgacagagatgaagtccggtttttcaaagggaataagtactgggctgttcagggacagaatgtgctacacggataccccaaggacatctacagctcctttggcttccctagaactgtgaagcatatcgatgctgctctttctgaggaaaacactggaaaaacctacttctttgttgctaacaaatactggaggtatgatgaatataaacgatctatggatccaggttatcccaaaatgatagcacatgactttcctggaattggccacaaagttgatgcagttttcatgaaagatggatttttctatttctttcatggaacaagacaatacaaatttgatcctaaaacgaagagaattttgactctccagaaagctaatagctggttcaactgcaggaaaaattgaacattactaatttgaatggaaaacacatggtgtgagtccaaagaaggtgttttcctgaagaactgtctattttctcagtcatttttaacctctagagtcactgatacacagaatataatcttatttatacctcagtttgcatatttttttactatttagaatgtagccctttttgtactgatataatttagttccacaaatggtgggtacaaaaagtcaagtttgtggcttatggattcatataggccagagttgcaaagatcttttccagagtatgcaactctgacgttgatcccagagagcagcttcagtgacaaacatatcctttcaagacagaaagagacaggagacatgagtctttgccggaggaaaagcagctcaagaacacatgtgcagtcactggtgtcaccctggataggcaagggataactcttctaacacaaaataagtgttttatgtttggaataaagtcaaccttgtttctactgtttt

SEQ ID NO: 1827 - DNA, 2500 bp, Homo sapiens; identical to SEQ ID NO: 724

SEQ ID NO: 1828 - DNA, 1707 bp, Homo sapiens; identical to SEQ ID NO: 88

SEQ ID NO: 1829 - DNA, 1812 bp, Homo sapiens
attcatacaggagagaacccctatgaatgccatgaatgtgggaaagccttcagtcggaaataccagcttatttcacaccagagaactcatgcaggagagaagccttatgaatgcaccgactgtggaaaggcttttggtttaaagtcacagcttattatacaccagagaactcatacaggggagaaaccatttgaatgtagtgagtgtcagaaagcctttaatacaaagtcaaacctgattgtacatcagagaactcatacaggagagaaaccctatagttgtaatgaatgtggaaaagcctttacgttcaaatcacagctcattgtacataaaggagtgcacactggagtaaaaccctatggatgcagtcaatgtgcaaaaacctttagtttgaagtcccagctcattgtacatcagagaagtcacacaggagtaaaaccatatggatgcagtgagtgtgggaaagccttcaggagcaagtcataccttattatacatatgagaactcatacaggagagaaaccacatgagtgcagggaatgcgggaaatcctttagtttcaattcacaactcattgtgcatcagagaattcacacaggagaaaatccctatgaatgcagtgaatgtgggaaagcctttaataggaaagaccagctcatttcacatcagcgaactcatgcaggggaaaagccttatgggtgcagtgaatgtgggaaagcttttagcagcaagtcatacctaattatacacatgagaactcattcaggtgaaaaaccatatgaatgtaatgaatgtgggaaagccttcatttggaaatcactactcattgtacatgagcgaactcatgcaggggtcaacccttataaatgcagtcaatgtgagaaatccttcagtgggaaattacgccttcttgtacaccagagaatgcacacaacagagaaaccatatgaatgcagtgagtgtggaaaagccttcattaggaattctcaactcattgtacatcaaagaactcattcaggagagaaaccctatgggtgcaatgaatgtgggaaaaccttctctcaaaaatcaattctcagtgcacatcagagaacacatacaggagagaagccttgtaagtgcactgaatgtgggaaagccttttgttggaagtcacagctcattatgcatcagagaactcatgtagatgacaaacattgataattttacgaaactctgaaaagtggattcacaagagatagaaacaatcatatataaagagaaactctgtaagtggaatcatcttgtcatcttccagaaaactcatactgaatagaactttatgaatgcacagcatatggaaaggcatccacagaaagctgttctttacatgcaaaaagatagtagacaatacacaggaaaactgaatttagtaaccactctgaaaatttttagcagcaagtcatacctttttttaaaaagttcatacaggtgaggaaccatgttaaacgttgtaaagtcattttactaacataagattcacaaagaggaaacttcatgaaccagatgaatatagaatagacttctttgaaattcatagtttacagaattttaatgagagaaattattgagctaatgaatggcagaattaacaaaattacaaacattttatgtatcggaaggatataccttggagggaccatgctatgagggaaagtgtaaatctagaaatgagaaacccctagggaaaaaatatatataggagtgaacatcttatgaatgtaccaaataaaccacagctggactgttaacctcaccttagaagcttcattc

SEQ ID NO: 1830 - DNA, 2905 bp, Homo sapiens
ggccgaatacatcaagcaatggtaacatctttaaatgaagataatgaaagtgtaactgttgaatggatagaaaatggagatacaaaaggcaaagagattgacctggagagcatcttttcacttaaccctgaccttgttcctgatgaagaaattgaacccagtccagaaacacctccacctccagcatcctcagccaaagtaaacaaaattgtaaagaatcgacggactgtagcttctattaagaatgaccctccttcaagagataatagagtggttggttcagcacgtgcacggcccagtcaatttcctgaacagtcttcctctgcacaacagaatggtagtgtttcagatatatctccagttcaagctgcaaaaaaggaatttggacccccttcacgtagaaaatctaattgtgtgaaagaagtagaaaaactgcaagaaaaacgagagaaaaggagattgcaacagcaagaacttagagaaaaaagagcccaggacgttgatgctacaaacccaaattatgaaattatgtgtatgatcagagactttagaggaagtttggattatagaccattaacaacagcagatcctattgatgaacataggatatgtgtgtgtgtaagaaaacgaccactcaataaaaaagaaactcaaatgaaagatcttgatgtaatcacaattcctagtaaagatgttgtgatggtacatgaaccaaaacaaaaagtagatttaacaaggtacctagaaaaccaaacatttcgttttgattatgcctttgatgactcagctcctaatgaaatggtttacaggtttactgctaaaccactagtggaaactatatttgaaaggggaatggctacatgctttgcttatgggcagactggaagtggaaaaactcatactatgggtggtgacttttcaggaaagaaccaagattgttctaaaggaatttatgcattagcagctcgagatgtctttttaatgctaaagaagccaaactataagaagctagaacttcaagtatatgcaaccttctttgaaatttatagtggaaaggtgtttgacttgctaaacaggaaaacaaaattaagagttctagaagatggaaaacagcaggttcaagtggtgggattacaggaacgggaggtcaaatgtgttgaagatgtactgaaactcattgacataggcaacagttgcagaacatccggtcaaacatctgcaaatgcacattcatctcggagccatgcagtgtttcagattattcttagaaggaaaggaaaactacatggcaaattttctctcattgatttggctggaaatgaaagaggagctgatacttccagtgcggacaggcaaactaggcttgaaggtgctgaaattaataaaagccttttagcactcaaggagtgcatcagagccttaggtagaaataaacctcatactcctttccgtgcaagtaaactcactcaggtgttaagagattctttcataggtgaaaactctcgtacctgcatgattgccacaatctctccaggaatggcatcctgtgaaaatactcttaatacattaagatatgcaaatagggtcaaagaattgactgtagatccaactgctgctggtgatgttcgtccaataatgcaccatccaccaaaccagattgatgacttagagacacagtggggtgtggggagttcccctcagagagatgatctaaaacttctttgtgaacaaaatgaagaagaagtctctccacagttgtttactttccacgaagctgtttcacaaatggtagaaatggaagaacaagttgtagaagatcacagggcagtgttccaggaatctattcggtggttagaagatgaaaaggccctcttagagatgactgaagaagtagattatgatgtcgattcatatgctacacaacttgaagctattcttgagcaaaaaatagacattttaactgaactgcgggataaagtgaaatctttccgtgcagctctacaagaggaggaacaagccagcaagcaaatcaacccgaagagaccccgtgccctttaaaccggcatttgctgctaaaggatacccagaaccctcactactgtaacatacaacggttcagctgtaagggccatttgaaagtttggaattttaagtgtctgtggaaaatgttttgtccttcacctgaattacatttcaattttgtgaaacactcttttgtctacaaaatgcttctagtccaggaggcacaaccaagaactgggattaatgaagcattttgtttcatttacacaaatagtgatttacttttggagatccttgtcagttttattttctatttgatgaagtaagactgtggactcaatccagagccagatagtaggggaagccacagcatttccttttaactcagttcaatttttgtagtgagactgagcagttttaaatcctttgcgtgcatgcatacctcatcagtgattgtacataccttgcccactcctagagacagctgtgctcacttttcctgctttgtgccttgattaaggctactgaccctaaatttctgaagcacagccaagaaaaattacattccttgtcattgtaaattacctttgtgtgtacatttttactgtatttgagacattttttgtgtgtgactagttaattttgcaggatgtgccatatcattgaacggaactaaagtctgtgacagtggatatagctgctggaccattccatcttatatgtaaagaaatctggaattattattttaaaaccatataacatgtgattataatttttcttagcattttctttgtaaagaactacaatataaactagttggtgtataataaaaagtaatgaaattctgaagaaaaaaaaaaaaaaaaaaaaaaaaaaaaaaaaa

SEQ ID NO: 1831 - DNA, 1625 bp, Homo sapiens
gcaggagccgcaatgtctcaggctgtgcagacaaacggaactcaaccattaagcaaaacatgggaactcagtttatatgagttacaacgaacacctcaggaggcaataacagatggcttagaaattgtggtttcacctcgaagtctacacagtgaattaatgtgcccaatttgtttggatatgttgaagaacaccatgactacaaaggagtgtttacatcgtttttgtgcagactgcatcatcacagcccttagaagtggcaacaaagaatgtcctacctgtcggaaaaaactagtttccaaaagatcactaaggccagacccaaactttgatgcactcatcagcaaaatttatccaagtcgtgatgagtatgaagctcatcaagagagagtattagccaggatcaacaagcacaataatcagcaagcactcagtcacagcattgaggaaggactgaagatacaggccatgaacagactgcagcgaggcaagaaacaacagattgaaaatggtagtggagcagaagataatggtgacagttcacactgcagtaatgcatccacacatagcaatcaggaagcaggccctagtaacaaacggaccaaaacatctgatgattctgggctagagcttgataataacaatgcagcaatggcaattgatccagtaatggatggtgctagtgaaattgaattagtattcaggcctcatcccacacttatggaaaaagatgacagtgcacagacgagatacataaagacttctggtaacgccactgttgatcacttatccaagtatctggctgtgaggttagctttagaagaacttcgaagcaaaggtgaatcaaaccagatgaaccttgatacagccagtgagaagcagtataccatttatatagcaacagccagtggccagttcactgtattaaatggctctttttctttggaattggtcagtgagaaatactggaaagtgaacaaacccatggaactttattacgcacctacaaaggagcacaaatgagcctttaaaaaccaattctgagactgaacttttttatagcctatttctttaatattaaagatgtactggcattacttttatggacagatcttggatatgttgttcaattttctttctgagccagaatagtttacgctattcaaatcttttcccccttatttaagatttcctttttggaagggactgcaattattcagtatttttttctttcctttaaaaaaatatatctgaagtttcttgtgttttttttttttccccacaaagtgtgtttccacttggagcaccattttgacccaggaatttttcatagtttctgtattcttataagattcagtggctgtccttttcctgctcccctcaaaagatttttagtcatacagaatgttaaatattatgtattctgaccttttttttttcccccggagtcttggtatatttatagttttctatataaactgtagtatcttcatgaagacccaaggctcaaatttactgtccttaaaaacaattctcataggattattcttttcatggtatcttcttccataatatctcattttaaaaagaagttctatatgaactttttgtccattgtcatgcaa

SEQ ID NO: 1832 - DNA, 2379 bp, Homo sapiens
ggaattccggtcggcctctcgcccttcagctacctgtgcgtccctccgtcccgtcccgtcccggggtcaccccggagcctgtccgctatgcggctcctgcctctagccccaggtcggctccggcggggcagcccccgccacctgccctcctgcagcccagcgctgctactgctggtgctgggcggctgcctgggggtcttcggggtggctgcgggaacccggaggcccaacgtggtgctgctcctcacggacgaccaggacgaagtgctcggcggcatgacaccactaaagaaaaccaaagctctcatcggagagatggggatgactttttccagtgcttatgtgccaagtgctctctgctgccccagcagagccagtatcctgacaggaaagtacccacataatcatcacgttgtgaacaacactctggaggggaactgcagtagtaagtcctggcagaagatccaagaaccaaatactttcccagcaattctcagatcaatgtgtggttatcagaccttttttgcagggaaatatttaaatgagtacggagccccagatgcaggtggactagaacacgttcctctgggttggagttactggtatgccttggaaaagaattctaagtattataattacaccctgtctatcaatgggaaggcacggaagcatggtgaaaactatagtgtggactacctgacagatgttttggctaatgtctccttggactttctggactacaagtccaactttgagcccttcttcatgatgatcgccactccagcgcctcattcgccttggacagctgcacctcagtaccagaaggctttccagaatgtctttgcaccaagaaacaagaacttcaacatccatggaacgaacaagcactggttaattaggcaagccaagactccaatgactaattcttcaatacagtttttagataatgcatttaggaaaaggtggcaaactctcctctcagttgatgaccttgtggagaaactggtcaagaggctggagttcactggggagctcaacaacacttacatcttctatacctcagacaatggctatcacacaggacagttttccttgccaatagacaagagacagctgtatgagtttgatatcaaagttccactgttggttcgaggacctgggatcaaaccaaatcagacaagcaagatgctggttgccaacattgacttgggtcctactattttggacattgctggctacgacctaaataagacacagatggatgggatgtccttattgcccattttgagaggtgccagtaacttgacctggcgatcagatgtcctggtggaataccaaggagaaggccgtaacgtcactgacccaacatgcccttccctgagtcctggcgtatctcaatgcttcccagactgtgtatgtgaagatgcttataacaatacctatgcctgtgtgaggacaatgtcagcattgtggaatttgcagtattgcgagtttgatgaccaggaggtgtttgtagaagtctataatctgactgcagacccagaccagatcactaacattgctaaaaccatagacccagagcttttaggaaagatgaactatcggttaatgatgttacagtcctgttctgggccaacctgtcgcactccaggggtttttgaccccggatacaggtttgacccccgtctcatgttcagcaatcgcggcagtgtcaggactcgaagattttccaaacatcttctgtagcgacctcacacagcctctgcagatggatccctgcacgcctctttctgatgaagtgattgtagtaggtgtctgtagctagtcttcaagaccacacctggaagagtttctgggctggctttaagtcctgtttgaaaaagcaacccagtcagctgacttcctcgtgcaatgtgttaaactgtgaactctgcccatgtgtcaggagtggctgtctctggtctcttcctttagctgacaaggacactcctgaggtctttgttctcactgtattttttttatcctggggccacagttcttgattattcctcttgtggttaaagactgaatttgtaaacccattcagataaatggcagtactttaggacacacacaaacacacagatacaccttttgatatgtaagcttgacctaaagtcaaaggacctgtgtagcatttcagattgagcacttcactatcaaaaatactaacatcacatggcttgaagagtaaccatcagagctgaatcatccaagtaagaacaagtaccattgttgattgataagtagagatacattttttatgatgttcatcacagtgtggtaaggttgcaaattcaaaacatgtcacccaagctctgttcatgtttttgtgaattc

SEQ ID NO: 1833 - DNA, 806 bp, Homo sapiens
tcccctccccaccacagctgtagtgcagtccaccgtctccagtggctatggcggtgccagcggtgtcggcagtggcttaggcctgggtggaggaagcagctactcctatggcagtggtcttggcgttggaggcggctttagttccagcagcggcagagccactgggggtggcctcagctctgttggaggcggcagttccaccatcaagtacaccaccacctcctcctccagcaggaagagctacaagcactgaagctgtgccgccagctctcagtcccacagctctcaggcccctctctggcagcagagccctctcctcaggttgcttgtcctcccctggcctccagtctcccctgccctcccgggtagagctgggatgccctcacttttcttctcatcaatactgttccactgagctcctgttgcttaccatcaagtcaacagttatcagcactcagacatgcgaatgtcctttttagttcccgtattattacaggtatctgagtctgccataattctgagaagaaaaatgacctatatcccccataagaactgaaactcagtctaggagttctcatctgacaagtcagttgtcctgatcttctcttgcagtgtcctgaatggcaagtagtgtaccttctagtgcagtctgcattcctgcactgctttctctgctctctttgccttcttttgttctgtgtgaataaagcatattgagaatgtgaacatgttgtgttagattgtattgctgaccacttcctggtttagaaacattcgcaccccacaaatggtttcttatctttggg

SEQ ID NO: 1834 - DNA, 1306 bp, Homo sapiens; identical to SEQ ID NO: 732

SEQ ID NO: 1835 - DNA, 1496 bp, Homo sapiens
gggccggcggctgcggcggctggagcaggcgagcggcggcggccgatagcgagtgtcagggccggccggggcggcgcttctcggcctgtcgctggtcggcctcctactgtacctcgtgcctgctgcggctgcgctggcctggctggccgtggggactaccgcggcctggtggggactgagccgcgagccccgaggttcgcgccccttgtcctccttcgttcagaaggcgcgacatcggcgaacactgttcgcttcgcctccggccaagtcgacagccaacggaaacctcctagagccgcggaccctgctcgaaggacctgaccctgccgaactgctcctcatgggcagttacctgggcaagcccgggccgccgcagcccgcccccgctccggagggccaggacctgcggaataggcctggccgccgcccgcccgcccggcgccgcgctccacaccgccctccccgccgacccatcgcgttcaccacttttacccctctctccccactcctcttctccgaccctccgggaggccttccccacgggatcgtgggactttaccagatcggtttgtaataacacctcgaagacgctatccgatccatcaggcccagtattcctgtccgggggtacttcccacagtgtgctggaatggttatcacaagaaggctgtgctgtcccctcgcaactccaggatggtgtgtagcccagtgactgtgaggatcgcccctcctgacagaagattttcgcgttctgcgataccagagcagataatcagctcaacactgtcctcaccatcaagtaatgccccagacccatgtgcaaaggagactgtactgagtgccctcaaagagaagaagaagaaaaggacagtggaggaagaagaccaaatattccttgatggccaggaaaataaaagaagctgtcttgtcgacggtctcactgatgcctcttctgcattcaaagttcctcgacccgggccagatacactccagttcacagtggatgtcttccactttgctaatgactccagaaacatgatatacatcacctgccacctgaaggtcaccctagctgagcaggacccagatgaactcaacaaggcctgttccttcagcaagccttccaacagctggttcccagtggaaggcccggctgacatctgtcaatgctgtaacaaaggtgactgtggcactccaagccattccaggaggcagcctcgtgtcgtgagccagtggtccacgtctgcttcccgtaaccgcaggcatgtgacagaagaagcagatgtcaccgtgggggccactgatcttcctggacaggagtggtgaccatgaagtagagcagtgggctttgccttctgacacctcagtggtgctgctgggcgtaggcctggctgtggtggtgtccctgactctgactgctgttatcctggttctcaccaggaggtgtcgcactgcctcccaccctgtgtctgcttccgaataaaagaagaaagcaa

SEQ ID NO: 1836 - DNA, 1025 bp, Homo sapiens; identical to SEQ ID NO: 736

SEQ ID NO: 1837 - DNA, 794 bp, Homo sapiens; identical to SEQ ID NO: 1803

SEQ ID NO: 1838 - DNA, 2244 bp, Homo sapiens; identical to SEQ ID NO: 1174

SEQ ID NO: 1839 - DNA, 736 bp, Homo sapiens
ggctctcaccctcctctcctgcagctccagctctgtgctctgcctctgaggagaccatggcccggcctctgtgtaccctgctactcctgatggctaccctggctggggctctggcctcgagctccaaggaggagaataggataatcccaggtggcatctatgatgcagacctcaatgatgagtgggtacagcgtgcccttcacttcgccatcagcgagtacaacaaggccaccgaagatgagtactacagacgcccgctgcaggtgctgcgagccagggagcagacctttgggggggtgaattacttcttcgacgtagaggtgggccgcaccatatgtaccaagtcccagcccaacttggacacctgtgccttccatgaacagccagaactgcagaagaaacagttatgctctttcgagatctacgaagttccctgggaggacagaatgtccctggtgaattccaggtgtcaagaagcctaggggtctgtgccaggccagtcacaccgaccaccacccactcccaccccctgtagtgctcccacccctggactggtggcccccaccctgcgggaggcctccccatgtgcctgtgccaagagacagacagagaaggctgcaggagtcctttgttgctcagcagggcgctctgccctccctccttccttcttgcttctaatagacctggtacatggtacacacacccccacctcctgcaattaaacagtagcatcgcc

SEQ ID NO: 1840 - DNA, 922 bp, Homo sapiens
  misc_feature: n=a,t,g or c
gtgaccctggccaggactgacctggagatgcagatcgaaggcctgaaggaggagctggcctacctgaggaagaaccacgaggaggagatgcttgctctgagaggtcagaccggcggagatgtgaacgtggagatggatgctgcacctggcgtggacctgagccgcatcctgaatgagatgcgtgaccagtacgagcagatggcagagaaaaaccgcagagacgctgagacctggttcctgagcaagaccgaggagctgaacaaagaagtggcctccaacagcgaactggtacagagcagccgcagtgaggtgacggagctccggagggtgctccagggcctggagattgagctgcagtcccagctcagcacgaaagcatccctggagaacagcctggaggagaccaaaggccgctactgcatgcagctgtcccagatccagggactgattggcagtgtggaggagcagctggcccagctacgctgtgagatggagcagcagagccaggagtaccagatcttgctggatgtgaagacgcggctggagcatgagattgccacctaccgccgcctgctgganggcgaggatgcccacctttcctcccagcaagcatctggccaatcctattcttcccgcgaggtcttcacctcctcctcgtcctcttcgagccgtcagacccgacccatcctcaaggagcagagctcatccagcttcagccagggccagagttcctagaactgagctgcctctaccacagcctcctgcccaccagctggcctcacctcctgaaggcccgggtcaggaccctgctctcctggcgcagttcccagctatctcccctnctcctctgctggtggtgggctaataaagctgactttctggttgatgcaaaaaaaaaaaaaaaaaaaaaaaaaaaaaaaaa

SEQ ID NO: 1841 - DNA, 1284 bp, Homo sapiens
cctctgcttcctctaggaacacaggagttccagatcacatcgagttcaccatgaattcactcagtgaagccaacaccaagttcatgttcgatctgttccaacagttcagaaaatcaaaagagaacaacatcttctattcccctatcagcatcacatcagcattagggatggtcctcttaggagccaaagacaacactgcacaacaaattagcaaggttcttcactttgatcaagtcacagagaacaccacagaaaaagctgcaacatatcatgttgataggtcaggaaatgttcatcaccagtttcaaaagcttctgactgaattcaacaaatccactgatgcatatgagctgaagatcgccaacaagctcttcggagaaaagacgtatcaatttttacaggaatatttagatgccatcaagaaattttaccagaccagtgtggaatctactgattttgcaaatgctccagaagaaagtcgaaagaagattaactcctgggtggaaagtcaaacgaatgaaaaaattaaaaacctatttcctgatgggactattggcaatgatacgacactggttcttgtgaacgcaatctatttcaaagggcagtgggagaataaatttaaaaaagaaaacactaaagaggaaaaattttggccaaacaagaatacatacaaatctgtacagatgatgaggcaatacaattcctttaattttgccttgctggaggatgtacaggccaaggtcctggaaataccatacaaaggcaaagatctaagcatgattgtgctgctgccaaatgaaatcgatggtctgcagaagcttgaagagaaactcactgctgagaaattgatggaatggacaagtttgcagaatatgagagagacatgtgtcgatttacacttacctcggttcaaaatggaagagagctatgacctcaaggacacgttgagaaccatgggaatggtgaatatcttcaatggggatgcagacctctcaggcatgacctggagccacggtctctcagtatctaaagtcctacacaaggcctttgtggaggtcactgaggagggagtggaagctgcagctgccaccgctgtagtagtagtcgaattatcatctccttcaactaatgaagagttctgttgtaatcaccctttcctattcttcataaggcaaaataagaccaacagcatcctcttctatggcagattctcatccccatagatgcaattagtctgtcactccatttagaaaatgttcacctagaggtgttctggtaaactga

SEQ ID NO: 1842 - DNA, 3835 bp, Homo sapiens; identical to SEQ ID NO: 742

SEQ ID NO: 1843 - DNA, 623 bp, Homo sapiens
gaccaccagttctaagggaccatacagagtattcctctcttcacaccaggaccagccactgttgcagcatgagttcccagcagcagaagcagccctgcatcccaccccctcagcttcagcagcagcaggtgaaacagccttgccagcctccacctcaggaaccatgcatccccaaaaccaaggagccctgccaccccaaggtgcctgagccctgccaccccaaagtgcctgagccctgccagcccaaggttccagagccatgccaccccaaggtgcctgagccctgcccttcaatagtcactccagcaccagcccagcagaagaccaagcagaagtaatgtggtccacagccatgcccttgaggagccggccaccagatgctgaatcccctatcccattctgtgtatgagtcccatttgccttgcaattagcattctgtctcccccaaaaaagaatgtgctatgaagctttctttcctacacactctgagtctctgaatgaagctgaaggtcttagtaccagagctagttttcagctgctcagaattcatctgaagagagacttaagatgaaagcaaatgattcagctcccttatacccccattaaattcactttcaattcca

SEQ ID NO: 1844 - DNA, 683 bp, Homo sapiens; identical to SEQ ID NO: 744

SEQ ID NO: 1845 - DNA, 1986 bp, Homo sapiens
cgcgccaacgctcgccacagccctctcatctcctggaaccatggccagcacatccaccaccatcaggagccacagcagcagccgccggggtttcagtgccaactcagccaggctccctggggtcagccgctctggcttcagcagcatctccgtgtcccgctccaggggcagtggtggcctgggtggtgcatgtggaggagctggctttggcagccgcagcttatatggcctggggggatccaagaggatctccattggagggggcagctgtgccatcagtggcggctatggcagcagagccagaggcagctatggctttggtggcgccgggagtggatttggtttcggtggtggagccggcattggctttgatctgggtggtggagccggccttgctggtggctttgggggccctggcttccctgtgtgcccccctggaggcatccaagaggtcactgtcaaccagagtctcctgactcccctcaacctgcaaattgaccccgccatccagcgggtgcgggccgaggagcgtgagcagatcaagaccctcaacaacaagtttgcctccttcatcgacaaggtgcggttcctagagcagcagaacaaggttctggacaccaagtggaccctgctgcaggagcagggcaccaagactgtgaggcagaacctggagccgttgttcgagcagtacatcaacaacctcaggaggcagctggacaacatcgtgggggaacggggccgcctggactcggagctgagaaacatgcaggacctggtggaggacctcaagaacaaatatgaggatgaaatcaacaagcgcacagcagcagagaatgaatttgtgactctgaagaaggatgtggatgctgcctacatgaacaaggttgaactgcaagccaaggcagacactctcacagatgagatcaacttcctgagagccttgtatgatgcagagctgtcccagatgcagacccacatctcagacacatccgtggtgctatccatggacaacaaccgcaacctggacctggacagcatcatcgctgaggtcaaggcccaatacgaggagattgctcagaggagccgggctgaggctgagtcctggtaccagaccaagtacgaggagctgcaggtcacagcaggcagacatggggacgacctgcgcaacaccaagcaggagattgctgagatcaaccgcatgatccagaggctgagatctgagatcgaccatgtcaagaagcagtgtgccagcctgcaggctgccattgctgatgctgagcagcgtggggagatggccctcaaggatgctaagaacaagctggaagggctggaggatgccctgcagaaggccaagcaggacctggcccggctgctgaaggagtaccaggagctgatgaatgtcaagctggccctggacgtggagatcgccacctaccgcaagctgctggagggcgaggagtgcaggctgaatggcgaaggcattggacaagtcaacgtctctgtagtacagtccaccatctccagtggctatggcggtgccagtggtgtcggcagtggcttaggcctgggtggaggaagcagctactcctatggcagtggtcttggcattggaggtggcttcagttccagcagtggcagagccattgggggtggcctcagctctgttggaggcggcagttccaccatcaagtacaccaccacctcctcctccagcaggaagagctacaagcactaaagtgctgcctccagctctcggtcccacagtcctcaggcccttctctggctgcagagccgtcttctcaggttgcctgtcgtctcctggcctctagtcttccctgctctccgaggtagagctgggtatggatgcttagtgccctcacttctctctgtctatacctgccccatctgagcacccattgctcaccatcagatcaacctttgattttacatcataatgtattcaccactggagcttcactttgttac

SEQ ID NO: 1846 - DNA, 680 bp, Homo sapiens
aaaaactcctggtacttgagcactgatctgctttggagaacctgattctgagactccagcaggatgtcttatcaacagcagcagtgcaagcagccctgccagccacctcctgtgtgccccacgccaaagtgcccagagccatgtccacccccgaagtgccctgagccctgcccaccaccaaagtgtccacagccctccccacctcagcagtgccagcaaaaatgtcctcctgtgacaccttccccaccctgccagccaaagtgtccacccaagagcaagtaacagcttcagaattcatcaggagcatgaaaggataaggataattggctcaccttgttccacagcttcacctgcatcttctcatcaaagcctaccatggatacacagttagcttctttcctcttagccagtgatctgcccatgatgatccctgatagcaaaaggtttcctttctgaggctgccatattgccactgtccaggtggatactgagaaaggaagtcctcagcagtgtcagttcccagagctttggaagaaggaccagcagctctgtccctgggaaccatcaaaaaatgctgttgatgttttctgtgtctgtctgtcacctgggcatgggcttctaacacctgtgcaattgtcacttttctttcacttccctgaataaatatctttgcatacgta

SEQ ID NO: 1847 - DNA, 847 bp, Homo sapiens; identical to SEQ ID NO: 1184

SEQ ID NO: 1848 - DNA, 9588 bp, Homo sapiens
ccgaccaacaccaacacccagctccgacgcagctcctctgcgcccttgccgccctccgagccacagctttcctcccgctcctgcccccggcccgtcgccgtctccgcgctcgcagcggcctcgggagggcccaggtagcgagcagcgacctcgcgagccttccgcactcccgcccggttccccggccgtccgcctatccttggccccctccgctttctccgcgccggcccgcctcgcttatgcctcggcgctgagccgctctcccgattgcccgccgacatgagctgcaacggaggctcccacccgcggatcaacactctgggccgcatgatccgcgccgagtctggcccggacctgcgctacgaggtgaccagcggcggcgggggcaccagcaggatgtactattctcggcgcggcgtgatcaccgaccagaactcggacggctactgtcaaaccggcacgatgtccaggcaccagaaccagaacaccatccaggagctgctgcagaactgctccgactgcttgatgcgagcagagctcatcgtgcagcctgaattgaagtatggagatggaatacaactgactcggagtcgagaattggatgagtgttttgcccaggccaatgaccaaatggaaatcctcgacagcttgatcagagagatgcggcagatgggccagccctgtgatgcttaccagaaaaggcttcttcagctccaagagcaaatgcgagccctttataaagccatcagtgtccctcgagtccgcagggccagctccaagggtggtggaggctacacttgtcagagtggctctggctgggatgagttcaccaaacatgtcaccagtgaatgtttggggtggatgaggcagcaaagggcggagatggacatggtggcctggggtgtggacctggcctcagtggagcagcacattaacagccaccggggcatccacaactccatcggcgactatcgctggcagctggacaaaatcaaagccgacctgcgcgagaaatctgcgatctaccagttggaggaggagtatgaaaacctgctgaaagcgtcctttgagaggatggatcacctgcgacagctgcagaacatcattcaggccacgtccagggagatcatgtggatcaatgactgcgaggaggaggagctgctgtacgactggagcgacaagaacaccaacatcgctcagaaacaggaggccttctccatacgcatgagtcaactggaagttaaagaaaaagagctcaataagctgaaacaagaaagtgaccaacttgtcctcaatcagcatccagcttcagacaaaattgaggcctatatggacactctgcagacgcagtggagttggattcttcagatcaccaagtgcattgatgttcatctgaaagaaaatgctgcctactttcagttttttgaagaggcgcagtctactgaagcatacctgaaggggctccaggactccatcaggaagaagtacccctgcgacaagaacatgcccctgcagcacctgctggaacagatcaaggagctggagaaagaacgagagaaaatccttgaatacaagcgtcaggtgcagaacttggtaaacaagtctaagaagattgtacagctgaagcctcgtaacccagactacagaagcaataaacccattattctcagagctctctgtgactacaaacaagatcagaaaatcgtgcataagggggatgagtgtatcctgaaggacaacaacgagcgcagcaagtggtacgtgacgggcccgggaggcgttgacatgcttgttccctctgtggggctgatcatccctcctccgaacccactggccgtggacctctcttgcaagattgagcagtactacgaagccatcttggctctgtggaaccagctctacatcaacatgaagagcctggtgtcctggcactactgcatgattgacatagagaagatcagggccatgacaatcgccaagctgaaaacaatgcggcaggaagattacatgaagacgatagccgaccttgagttacattaccaagagttcatcagaaatagccaaggctcagagatgtttggagatgatgacaagcggaaaatacagtctcagttcaccgatgcccagaagcattaccagaccctggtcattcagctccctggctatccccagcaccagacagtgaccacaactgaaatcactcatcatggaacctgccaagatgtcaaccataataaagtaattgaaaccaacagagaaaatgacaagcaagaaacatggatgctgatggagctgcagaagattcgcaggcagatagagcactgcgagggcaggatgactctcaaaaacctccctctagcagaccaggggtcttctcaccacatcacagtgaaaattaacgagcttaagagtgtgcagaatgattcacaagcaattgctgaggttctcaaccagcttaaagatatgcttgccaacttcagaggttctgaaaagtactgctatttacagaatgaagtatttggactatttcagaaactggaaaatatcaatggtgttacagatggctacttaaatagcttatgcacagtaagggcactgctccaggctattctccaaacagaagacatgttaaaggtttatgaagccaggctcactgaggaggaaactgtctgcctggacctggataaagtggaagcttaccgctgtggactgaagaaaataaaaaatgacttgaacttgaagaagtcgttgttggccactatgaagacagaactacagaaagcccagcagatccactctcagacttcacagcagtatccactttatgatctggacttgggcaagttcggtgaaaaagtcacacagctgacagaccgctggcaaaggatagataaacagatcgactttagattatgggacctggagaaacaaatcaagcaattgaggaattatcgtgataactatcaggctttctgcaagtggctctatgatcgtaaacgccgccaggattccttagaatccatgaaatttggagattccaacacagtcatgcggtttttgaatgagcagaagaacttgcacagtgaaatatctggcaaacgagacaaatcagaggaagtacaaaaaattgctgaactttgcgccaattcaattaaggattatgagctccagctggcctcatacacctcaggactggaaactctgctgaacatacctatcaagaggaccatgattcagtccccttctggggtgattctgcaagaggctgcagatgttcatgctcggtacattgaactacttacaagatctggagactattacaggttcttaagtgagatgctgaagagtttggaagatctgaagctgaaaaataccaagatcgaagttttggaagaggagctcagactggcccgagatgccaactcggaaaactgtaataagaacaaattcctggatcagaacctgcagaaataccaggcagagtgttcccagttcaaagcgaagcttgcgagcctggaggagctgaagagacaggctgagctggatgggaagtcggctaagcaaaatctagacaagtgctacggccaaataaaagaactcaatgagaagatcacccgactgacttatgagattgaagatgaaaagagaagaagaaaatctgtggaagacagatttgaccaacagaagaatgactatgaccaactgcagaaagcaaggcaatgtgaaaaggagaaccttggttggcagaaattagagtctgagaaagccatcaaggagaaggagtacgagattgaaaggttgagggttctactgcaggaagaaggcacccggaagagagaatatgaaaatgagctggcaaaggtaagaaaccactataatgaggagatgagtaatttaaggaacaagtatgaaacagagattaacattacgaagaccaccatcaaggagatatccatgcaaaaagaggatgattccaaaaatcttagaaaccagcttgatagactttcaagggaaaatcgagatctgaaggatgaaattgtcaggctcaatgacagcatcttgcaggccactgagcagcgaaggcgagctgaagaaaacgcccttcagcaaaaggcctgtggctctgagataatgcagaagaagcagcatctggagatagaactgaagcaggtcatgcagcagcgctctgaggacaatgcccggcacaagcagtccctggaggaggctgccaagaccattcaggacaaaaataaggagatcgagagactcaaagctgagtttcaggaggaggccaagcgccgctgggaatatgaaaatgaactgagtaaggtaagaaacaattatgatgaggagatcattagcttaaaaaatcagtttgagaccgagatcaacatcaccaagaccaccatccaccagctcaccatgcagaaggaagaggataccagtggctaccgggctcagatagacaatctcacccgagaaaacaggagcttatctgaagaaataaagaggctgaagaacactctaacccagaccacagagaatctcaggagggtggaagaagacatccaacagcaaaaggccactggctctgaggtgtctcagaggaaacagcagctggaggttgagctgagacaagtcactcagatgcgaacagaggagagcgtaagatataagcaatctcttgatgatgctgccaaaaccatccaggataaaaacaaggagatagaaaggttaaaacaactgatcgacaaagaaacaaatgaccggaaatgcctggaagatgaaaacgcgagattacaaagggtccagtatgacctgcagaaagcaaacagtagtgcgacggagacaataaacaaactgaaggttcaggagcaagaactgacacgcctgaggatcgactatgaaagggtttcccaggagaggactgtgaaggaccaggatatcacgcggttccagaactctctgaaagagctgcagctgcagaagcagaaggtggaagaggagctgaatcggctgaagaggaccgcgtcagaagactcctgcaagaggaagaagctggaggaagagctggaaggcatgaggaggtcgctgaaggagcaagccatcaaaatcaccaacctgacccagcagctggagcaggcatccattgttaagaagaggagtgaggatgacctccggcagcagagggacgtgctggatggccacctgagggaaaagcagaggacccaggaagagctgaggaggctctcttctgaggtcgaggccctgaggcggcagttactccaggaacaggaaagtgtcaaacaagctcacttgaggaatgagcatttccagaaggcgatagaagataaaagcagaagcttaaatgaaagcaaaatagaaattgagaggctgcagtctctcacagagaacctgaccaaggagcacttgatgttagaagaagaactgcggaacctgaggctggagtacgatgacctgaggagaggacgaagcgaagcggacagtgataaaaatgcaaccatcttggaactaaggagccagctgcagatcagcaacaaccggaccctggaactgcaggggctgattaatgatttacagagagagagggaaaatttgagacaggaaattgagaaattccaaaagcaggctttagaggcatctaataggattcaggaatcaaagaatcagtgtactcaggtggtacaggaaagagagagccttctggtgaaaatcaaagtcctggagcaagacaaggcaaggctgcagaggctggaggatgagctgaatcgtgcaaaatcaactctagaggcagaaaccagggtgaaacagcgcctggagtgtgagaaacagcaaattcagaatgacctgaatcagtggaagactcaatattcccgcaaggaggaggctattaggaagatagaatcggaaagagaaaagagtgagagagagaagaacagtcttaggagtgagatcgaaagactccaagcagagatcaagagaattgaagagaggtgcaggcgtaagctggaggattctaccagggagacacagtcacagttagaaacagaacgctcccgatatcagagggagattgataaactcagacagcgcccatatgggtcccatcgagagacccagactgagtgtgagtggaccgttgacacctccaagctggtgtttgatgggctgaggaagaaggtgacagcaatgcagctctatgagtgtcagctgatcgacaaaacaaccttggacaaactattgaaggggaagaagtcagtggaagaagttgcttctgaaatccagccattccttcggggtgcaggatctatcgctggagcatctgcttctcctaaggaaaaatactctttggtagaggccaagagaaagaaattaatcagcccagaatccacagtcatgcttctggaggcccaggcagctacaggtggtataattgatccccatcggaatgagaagctgactgtcgacagtgccatagctcgggacctcattgacttcgatgaccgtcagcagatatatgcagcagaaaaagctatcactggttttgatgatccattttcaggcaagacagtatctgtttcagaagccatcaagaaaaatttgattgatagagaaaccggaatgcgcctgctggaagcccagattgcttcagggggtgtagtagaccctgtgaacagtgtctttttgccaaaagatgtcgccttggcccgggggctgattgatagagatttgtatcgatccctgaatgatccccgagatagtcagaaaaactttgtggatccagtcaccaaaaagaaggtcagttacgtgcagctgaaggaacggtgcagaatcgaaccacatactggtctgctcttgctttcagtacagaagagaagcatgtccttccaaggaatcagacaacctgtgaccgtcactgagctagtagattctggtatattgagaccgtccactgtcaatgaactggaatctggtcagatttcttatgacgaggttggtgagagaattaaggacttcctccagggttcaagctgcatagcaggcatatacaatgagaccacaaaacagaagcttggcatttatgaggccatgaaaattggcttagtccgacctggtactgctctggagttgctggaagcccaagcagctactggctttatagtggatcctgttagcaacttgaggttaccagtggaggaagcctacaagagaggtctggtgggcattgagttcaaagagaagctcctgtctgcagaacgagctgtcactgggtataatgatcctgaaacaggaaacatcatctctttgttccaagccatgaataaggaactcatcgaaaagggccacggtattcgcttattagaagcacagatcgcaaccggggggatcattgacccaaaggagagccatcgtttaccagttgacatagcatataagaggggctatttcaatgaggaactcagtgagattctctcagatccaagtgatgataccaaaggattttttgaccccaacactgaagaaaatcttacctatctgcaactaaaagaaagatgcattaaggatgaggaaacagggctctgtcttctgcctctgaaagaaaagaagaaacaggtgcagacatcacaaaagaataccctcaggaagcgtagagtggtcatagttgacccagaaaccaataaagaaatgtctgttcaggaggcctacaagaagggcctaattgattatgaaaccttcaaagaactgtgtgagcaggaatgtgaatgggaagaaataaccatcacgggatcagatggctccaccagggtggtcctggtagatagaaagacaggcagtcagtatgatattcaagatgctattgacaagggccttgttgacaggaagttctttgatcagtaccgatccggcagcctcagcctcactcaatttgctgacatgatctccttgaaaaatggtgtcggcaccagcagcagcatgggcagtggtgtcagcgatgatgtttttagcagctcccgacatgaatcagtaagtaagatttccaccatatccagcgtcaggaatttaaccataaggagcagctctttttcagacaccctggaagaatcgagccccattgcagccatctttgacacagaaaacctggagaaaatctccattacagaaggtatagagcggggcatcgttgacagcatcacgggtcagaggcttctggaggctcaggcctgcacaggtggcatcatccacccaaccacgggccagaagctgtcacttcaggacgcagtctcccagggtgtgattgaccaagacatggccaccagcgtgaagcctgctcagaaagccttcataggcttcgagggtgtgaagggaaagaagaagatgtcagcagcagaggcagtgaaagaaaaatggctcccgtatgaggctggccagcgcttcctggagttccagtacctcacgggaggtcttgttgacccggaagtgcatgggaggataagcaccgaagaagccatccggaaggggttcatagatggccgcgccgcacagaggctgcaagacaccagcagctatgccaaaatcctgacctgccccaaaaccaaattaaaaatatcctataaggatgccataaatcgctccatggtagaagatatcactgggctgcgccttctggaagccgcctccgtgtcgtccaagggcttacccagcccttacaacatgtcttcggctccggggtcccgctccggctcccgctcgggatctcgctccggatctcgctccgggtcccgcagtgggtcccggagaggaagctttgacgccacagggaattcttcctactcttattcctactcatttagcagtagttctattgggcactagtagtcagttgggagtggttgctataccttgacttcatttatatgaatttccactttattaaataatagaaaagaaaatcccggtgcttgcagtagagtgataggacattctatgcttacagaaaatatagccatgattgaaatcaaatagtaaaggctgttctggctttttatcttcttagctcatcttaaataagcagtacacttggatgcagtgcgtctgaagtgctaatcagttgtaacaatagcacaaatcgaacttaggatttgtttcttctcttctgtgtttcgatttttgatcaattctttaattttggaagcctataatacagttttctattcttggagataaaaattaaatggatcactgatattttagtcattctgcttctcatctaaatatttccatattctgtattaggagaaaattaccctcccagcaccagcccccctctcaaacccccaacccaaaaccaagcattttggaatgagtctcctttagtttcagagtgtggattgtataacccatatactcttcgatgtacttgtttggtttggtattaatttgactgtgcatgacagcggcaatcttttctttggtcaaagttttctgtttattttgcttgtcatattcgatgtactttaaggtgtctttatgaagtttgctattctggcaataaacttttagactttt

SEQ ID NO: 1849 - DNA, 1275 bp, Homo sapiens
atggctgccgggccgatctccgagcggaatcaggatgccactgtgtacgtggggggcctggatgagaaggttagtgaaccgctgctgtgggaactgtttctccaggctggaccagtagtcaacacccacatgccaaaggatagagtcactggccagcaccaaggctatggctttgtggaattcttgagtgaggaagatgctgactatgccattaagatcatgaacatgatcaaactctatgggaagccaatacgggtgaacaaagcatcagctcacaacaaaaacctggatgtaggggccaacattttcattgggaacctggaccctgagattgatgagaagttgctttatgatactttcagcgcctttggggtcatcttacaaacccccaaaattatgcgggaccctgacacaggcaactccaaaggttatgcctttattaattttgcttcatttgatgcttcggatgcagcaattgaagccatgaatgggcagtacctctgtaaccgtcctatcaccgtatcttatgccttcaagaaggactccaagggtgagcgccatggctcagcagccgaacgacttctggcagctcagaacccgctctcccaggctgatcgccctcatcagctgtttgcagatgcacctcctccaccctctgctcccaatcctgtggtatcatcattggggtctgggcttcctccaccaggcatgcctcctcctggctccttcccacccccagtgccacctcctggagccctcccacctgggatacccccagccatgcccccaccacctatgcctcctggggctgcaggacatggccccccatcggcaggaaccccaggggcaggacatcctggtcatggacactcacatcctcacccattcccaccgggtgggatgccccatccagggatgtctcagatgcagcttgcacaccatggccctcatggcttaggacatccccacgctggacccccaggctctgggggccagccaccgccccgaccaccacctggaatgcctcatcctggacctcctccaatgggcatgcccccccgagggcctccattcggatctcccatgggtcacccaggtcctatgcctccgcatggtatgcgtggacctcctccactgatgcccccccatggatacactggccctccacgacccccaccctatggctaccagcgggggcctctccctccacccagacccactccccggccaccagttccccctcgaggcccacttcgaggccctctccctcagtaa

SEQ ID NO: 1850 - DNA, 1636 bp, Homo sapiens; identical to SEQ ID NO: 1185

SEQ ID NO: 1851 - DNA, 493 bp, Homo sapiens; identical to SEQ ID NO: 303

SEQ ID NO: 1852 - DNA, 334 bp, Homo sapiens
gcaagattttacttgaacagtgaaggacaaaaatcatgattgtggaagatatttttaaaatctgattttgcagcgatcacttttaaaccctgtagtgatgtaagactaaaatataattgctaagattttgttggttaatgtaaagatatgacttttctgcactgtactctcttcataggattgtaaaggtgttctaatccaattgcatgatgtagtaagcctcttaaatatgtgtgttaaatatattgagtttgggattaaaatgttgacatgatttcacatttggaaaataaactcatctcttattttggaaaaaaaaaaaaaaaaaaaaaaa

SEQ ID NO: 1853 - DNA, 441 bp, Homo sapiens
  misc_feature: n=a,t,g or c
attaaaacgaaacggcggggctagctgtgtataaatgatccttgctgaatatcttaaggttttttgtaagaaaaaagaaaaaccaacaaaaaaagcttattttcacattaaaatgaaacctcttttgcaacttaagaattctatggaaaagcagtttttatcatattttgtgtccatgcaccatttttcttaaaatggcttacaaaaaagaatgtaaacaatttgtgatctggccagttgtacttttagctcccagaggagacgtntggtggtattatgacgttgagtaaaaaccatccaggggaacttgagggagcagtctgttgccagtaatgttccttgtgtgccattaaaccacctccagatgagtggaggaacatcactttttaattttttaattgtatttggaatngttgccgtgtactaagaacttgncctaan

SEQ ID NO: 1854 - DNA, 387 bp, Homo sapiens
tttaagatagaaaggcagatgatttctttattgtaaagacagcagttacaaaagagaataaatatgacattaggatatatttgttaaaaatacaacaaaaacccctagtatttgtgagcaaccccaagaactcacaagtatgggggataagaacatctacagctggataccctgaaacagatgttagaaactggctaatggtgagtatggccatgactttggggatgtttgaaaggccctggatctgtcacttgggaacgtcagcggtctactgtaatacaatttgcacagagtcagagtgaacaggaacccttttactcattggtatcctaactattctttcgttcttacagtgaagtagtacagtatttaagagtggggaaaagg

SEQ ID NO: 1855 - DNA, 375 bp, Homo sapiens
ccataaaaacagtaaaatgtttattttcttagaaaaaaagtgaggaagagggattcaaaatgattgtgatcacacttccatctgcatctgagcaaagccaatgttgcaagcttaattcttgattaagatacctattaaatcaaacaacctgccactcactcctacgtcacttccaggagtcacatcacagcatgcttttaattgataatagcttctctacttcttctgagcagagaaacaaggcttggcatagcaaccatcccatctccaaagctcaacactgccagtgagaagcaaggctcagtccatctctagactgcgtgcgagagatggggaggaaggagagagggcaggagatgcttgtcttagaagcag

SEQ ID NO: 1856 - DNA, 153 bp, Homo sapiens
  misc_feature: n=a,t,g or c
nngtanttaccaattgtatttattgctagaaactttaaactttttaaaaaagtttttgaatggtagataacatagaaaaagacatccataaaggtaggaagcaatctcatcatttacaaagtgctgcaaatttgataaatttatgttgctgat

SEQ ID NO: 1857 - DNA, 451 bp, Homo sapiens
ttttttttaaggatgagaagagattttagttattcagtgttttcagagtttcaacaagggatacagatacaagcagcttcttacagagtttacaatctggggagagaacatgaaagacactgtttaacaggcaaataattccaggaataaatatacatgaatgtgtttttcaaaatacaggttcttatacaaatgtataactaaatactgattccatagtggggtggttgtaactgaaagggctttgagaaaaggctttgaataaaactagtcatccacctagccaaagatcctttccagcagcacaaaaggaatttgtaaggagaacagagattaactgtcagatatctttctaatctgtaaatttatccaaagtttgaaaataccatgaagaatcttaggaatgccagtaaccagggaatgggatatttgcatatcacaacatctacag

SEQ ID NO: 1858 - DNA, 301 bp, Homo sapiens
cgcggtcgaatattatttattgtcagaaaggtacagcattcacaccaatatcagacaaaatagattttaactaaaaaattatttccgagacaaaaataacaatatatgttaataaaaggctcaattaaaaatgtataacaattataaacacatacacatcamaacaacagttccccaaaatacataaagcamacaytgacasgatgaagggagaaatagaccmctctacaatagtagttggggtcttcaacaccccmctyttcamtaataatcacasccacttaagggacccgtgcatacc

SEQ ID NO: 1859 - DNA, 390 bp, Homo sapiens
  misc_feature: n=a,t,g or c
ttttnaccatattcatatatttatagagctagtatgtcaaaaactttacacagtgacaccattagcccctgggccacccctctccttcccacttctgtgttcgaccctacttagaccctcgcacacaaaggttgatcaaaggcagtggccacctcagantagtgcaatgccagtcctgcaggggagaggcctgggnaagggtgagggtgagtntcccacagtccaagacagggtcccagaccttgggcccacccagcgagggacaaaggggcctcaggtnttccaaantttaggcttcatgttaggggcaacttgcccaccatttnttcccttgccattgacaaatttttntagggggattgacctgggggnccagangttangggaagg

SEQ ID NO: 1860 - DNA, 700 bp, Homo sapiens
ttctctctaggggagagtacggtttccatgaatatacagaggtcaaaacagtcacagtgaaaatctctcagaagaactcataaagaaaatacaagagtggagagaagctcttcaatagctaagcatctccttacagtcactaatatagtagattttaaagacaaaatttttcttttcttgattttttttaaacataagctaaatcatattagtattaatactacccatagaaaacttgacatgtagcttcttctgaaagaattatttgccttctgaaatgtgacccccaagtcctatcctaaataaaaaaagacaaattcggatgtatgatctctctagctttgtcatagttatgtgattttcctttgtagctacttttgcaggataataattttatagaaaaggaacagttgcatttagcttctttcccttagtgactcttgaagtacttaacatacacgttaactgcagagtaaattgctctgttcccagtagttataaagtccttggactgttttgaaaagtttcctaggatgtcatgtctgcttgtcaaaagaaataatccctgtaatatttagctgtaaactgaatataaagcttaataaaaacaaccttgcatgattcttgttacttttgaatttttttaagtacaagttttggtcacagtgatttcttcttgtcacttaaaaacagtgttaaa

SEQ ID NO: 1861 - DNA, 314 bp, Homo sapiens
tcgtgtgtaataaagtggttcaaccatgattaggaactgaaatttagtagaagagggaaaaggagttaatgtaacaaattattttagctacaaaccccggtaatagagcacttgggggatgggatggggtgggttggtgagacaatcagaatggtaaattgattaaatgctcctaaccctgtaattttgtgcatagagcaccctatgctgtggaaataactgttcttagatttcattgtaactggactgttcaggttgcccagaggaatagaacattcctaattctaataaaataaacttttattttgttattc

SEQ ID NO: 1862 - DNA, 1023 bp, Homo sapiens
gtcagactggtcatgcaaggtcctgggcctgccttgggtcctggggagccacggaaggttgtgggtgccagagggttgtggtcagagccacagtcaggggccttctgagacctgtgccccctccccaccctccctccccacctccctaggccagctctggggtctcggcaggtggtccgcgacatgacctccgagttcttctctgcccagctccgggcccagatctctgacgacaccactcacccgatctcctactacaagcccgagttctacatgccggatgacgggggcactgctcacctgtctgtggtcgcagaggacggcagtgctgtgtccgccaccagcaccatcaacctctactttggctccaaggtgcgctccccagtcagcgggatcctgctcaataatgaaatggatgacttcagctctaccagcatcaccaacgagtttggggtacccccctcacctgccaatttcatccagccagggaagcagccgctctcgtccatgtgcccgacgatcatggtgggccaggacggccaggtccggatggtggtgggagctgccgggggcacgcagatcaccatggccactgcactggccatcatctacaacctctggttcggctatgacgtgaagtgggccgtggaggagccccggctgcacaaccagcttctgcccaacgtcacgacagtggagagaaacattgaccaggaagtgactgcagccctggagacccggcaccatcacacccagatcacgtccaccttcattgctgtggtgcaagccatcgtccgcatggctggtggctgggcagctgcctcggactccaggaaaggtggggaacctgctggctactgattgctccaggcggacaaggctgacaagcaatccaggaacaaaatactcaccaggacgaggaagaggactttgggggacaggcttctcctgtgagcagcagagcagcacaataaatgaggccactgtgccaggctccaggtggcctccctggcctgtctcccc

SEQ ID NO: 1863 - DNA, 375 bp, Homo sapiens
atccctccagtatttgctgtgggagctcgttttattctttaatttggaattcagtaatttttttttttttttgacgaattcctcccctcacaaaactgttctttcccacctctctccatatctaattcctgattcttgttatttttaagtcataaatgtagccagtcataaatacataaatgttaaccttcgggttgcaaccttgtctcttgcagtttaaggtaatggatattgtagcccatttgaattttcttcactcttattctcgtaattctggagtttcttcagattgtgggtgtattttattgtgctcctatgtaagatgaaggaattaactattaaaattacattttcaacataaaaaaaaaaaaaaaa

SEQ ID NO: 1864 - DNA, 395 bp, Homo sapiens
tttggattcatgcagtctttattaatctgacaaatacagaaaatctgcaatcagctatcaaaattatatcttaccaagaatttgaaaggtatttataaaaaaggtgtattcacagtctgtctgaattaagtacaaagcagtgtccacagaagcagaaggcagacaacatgtgagagtaaatgatcccactgaaaccctcaccccagcacctccaaggacaccaaaaacaagacagtcctgtacttgctactatatgcagctgactttgaaactgcctagtctcaacaattacgtatttcaaaaggaaaattgctttctgggaaatcgtccctgctacacagacacacagaccaactggcaatgctgccaccacatgtcagggctcagggtggacc

SEQ ID NO: 1865 - DNA, 233 bp, Homo sapiens
tttactgtgaaaatctttcttttattactgtctcatgtggcaaaataacattttatacaaataagtcacctagtttactttggacacaaagacaataaaaactggaatgtgattttgggggaagcgggaaggaggaggaaggacagatcaggtcattgatgtttcttatattctgtaaaaaatagatttacaggaaaaaaaatagactttcacaacttcaatgactttacacg

SEQ ID NO: 1866 - DNA, 370 bp, Homo sapiens
tttttttttttttttttctgaaatgatctgtctttattatgtcatcagaaaacaaaaaaatcccccgagtgtaaacaggagaaatgtgctggttaagttactcatcattatcttattattaacaaaataaagcactatctatgtttacagtcataaaaaaagaaacagcctggagagaagtgggggctttgaggatggagagaagacgggggcagacacagactccacatctggccctgtggaatttggggttcccgtactgatccaagggctatttagatcttcagagttaggtgacaatgggatttgatttccttagggaacaaactttgttgaaactgatcagaggctgagatccagtccctagtat

SEQ ID NO: 1867 - DNA, 328 bp, Homo sapiens
ggaaagcattttcaaactttatttacaactgtcacagtgacaaaaagtagtttggaaaaaaaaaaatgctagtttctccctgagcctcaaaaaagaacagatagaagttacaggaggttcatctcacaacaggcatttttactgaaatactaggaattttttcaatacaatcagttagaaatacacacaaattacttgaaaaaaaaaaaaagaggaggccagataggagctcagccacttgtccaagagcagctgggtccccccagcaggctccaccgctgagggtcctgacattagctgtcagcccctggcctgctcagactggcaa

SEQ ID NO: 1868 - DNA, 214 bp, Homo sapiens
tcttcacttaattgcatcacaagtaacaagaatgaaaaaggccacagttcatatattttcaccattacatatgtctataatacttgaaatgagtatggcaaaaccagcactgcacaaagatgagtccacttcaagtcccatgagaaagagcatgtctctaaagaaaaacaaacaaaaccaaagcaaaataaaaagagaggcctaaaggctttgc

SEQ ID NO: 1869 - DNA, 393 bp, Homo sapiens
  misc_feature: n=a,t,g or c
gttgaaanntttatttcanggatttaaatccacccccttccgagaacaccagattaaaagacctccagcaatccatgattctagtatactcatctctgactgctgtatgtaagatgtgatttgattaaagnangacagacaacangtgcatttattagggncaacattctgaatactcacgagtagttatcttgcacacttaaccctaggccagaggacacagggcaaccacacagganaaggntaccagggcagngtcactggagttttgcttataccacaaaaggagttaaggcagtttaattcaaggatgcgaaaactacgtctatgacataaaacntgacattcacaanttaactcagcctttaaanatgtccccaantaccaacnagt

SEQ ID NO: 1870 - DNA, 5102 bp, Homo sapiens
gaattccacttctctgtcgcccgcggttcgccgccccgctcgccgccgcgatgccagtgtttcatacgcgcacgatcgagagcatcctggagccggtggcacagcagatctcccacctggtgataatgcacgaggagggcgaggtggacggcaaagccattcctgacctcaccgcgcccgtggccgccgtgcaggcggccgtcagcaacctcgtccgggttggaaaagagactgttcaaaccactgaggatcagattttgaagagagatatgccaccagcatttattaaggttgagaatgcttgcaccaagcttgtccaggcagctcagatgcttcagtcagacccttactcagtgcctgctcgagattatctaattgatgggtcaaggggcatcctctctggaacatcagacctgctccttaccttcgatgaggctgaggtccgtaaaattattagagtttgcaaaggaattttggaatatcttacagtggcagaggtggtggagactatggaagatttggtcacttacacaaagaatcttgggccaggaatgactaagatggccaagatgattgacgagagacagcaggagctcactcaccaggagcaccgagtgatgttggtgaactcgatgaacaccgtgaaagagttgctgccagttctcatttcagctatgaagatttttgtaacaactaaaaactcaaaaaaccaaggcatagaggaagctttaaaaaatcgcaattttactgtagaaaaaatgagtgctgaaattaatgagataattcgtgtgttacaactcacctcttgggatgaagatgcctgggccagcaaggacactgaagccatgaagagagcattggcctccatagactccaaactgaaccaggccaaaggttggctccgtgaccctagtgcctccccaggggatgctggtgagcaggccatcagacagatcttagatgaagctggaaaagttggtgaactctgtgcaggcaaagaacgcagggagattctgggaacttgcaaaatgctagggcagatgactgatcaagtggctgacctccgtgccagaggacaaggatcctcaccggtggccatgcagaaagctcagcaggtatctcagggtctggatgtgctcacagcaaaagtggaaaatgcagctcgcaagctggaagccatgaccaactcaaagcagagcattgcaaagaagatcgatgctgctcagaactggcttgcagatccaaatggtggaccggaaggagaagagcagattcgaggtgctttggctgaagctcggaaaatagcagaattatgtgatgatcctaaagaaagagatgacattctacgttcccttggggaaatatctgctctgacttctaaattagcagatctacgaagacaggggaaaggagattctccagaggctcgagccttggccaaacaggtggccacggccctgcagaacctgcagaccaaaaccaaccgggctgtggccaacagcagaccggccaaagcagctgtacaccttgagggcaagattgagcaagcacagcggtggattgataatcccacagtggatgaccgtggagtcggtcaggctgccatccgggggcttgtggccgaagggcatcgtctggctaatgttatgatggggccttatcggcaagatcttctcgccaagtgtgaccgagtggaccagctgacagcccagctggctgacctggctgccagaggggaaggggagagtcctcaggcacgagcacttgcatctcagctccaagactccttaaaggatctaaaagctcggatgcaggaggccatgactcaggaagtgtcagatgttttcagcgataccacaactcccatcaagctgttggcagtggcagccacggcgcctcctgatgcgcctaacagggaagaggtatttgatgagagggcagctaactttgaaaaccattcaggaaagcttggtgctacggccgagaaggcggctgcggttggtactgctaataaatcaacagtggaaggcattcaggcctcagtgaagacggcccgagaactcacaccccaggtggtctcggctgctcgtatcttacttaggaaccctggaaatcaagctgcttatgaacattttgagaccatgaagaaccagtggatcgataatgttgaaaaaatgacagggctggtggacgaagccattgataccaaatctctgttggatgcttcagaagaagcaattaaaaaagacctggacaagtgcaaggtagctatggccaacattcagcctcagatgctggttgctggggcaaccagtattgctcgtcgggccaaccggatcctgctggtggctaagagggaggtggagaattccgaggatcccaagttccgtgaggctgtgaaagctgcctctgatgaattgagcaaaaccatctccccaatggtgatggatgcaaaagctgtggctggaaacatttccgaccctggactgcaaaagagcttcctggactcaggatatcggatcctgggagctgtggccaaggtcagagaagccttccaacctcaggagcctgacttcccgccgcctccaccagaccttgaacaactccgactaacagatgagcttgctcctcccaaaccacctctgcctgaaggtgaggtccctccacctaggcctccaccaccagaggaaaaggatgaagagttccctgagcagaaggccggggaggtgattaaccagccaatgatgatggctgccagacagctccatgatgaagctcgcaaatggtccagcaagggcaatgacatcattgcagcagccaagcgcatggctctgctgatggctgagatgtctcggctggtaagagggggcagtggtaccaagcgggcactcattcagtgtgccaaggacatcgccaaggcctcagatgaggtgactcggttggccaaggaggttgccaagcagtgcacagataaacggattagaaccaacctcttacaggtatgtgagcgaatcccaaccataagcacccagctcaaaatcctgtccacagtgaaggccaccatgctgggccggaccaacatcagtgatgaggagtctgagcaggccacagagatgctggttcacaatgcccagaacctcatgcagtctgtgaaggagactgtgcgggaagctgaagctgcttcaatcaaaattcgaacagatgctggatttacactgcgctgggttagaaagactccctggtaccagtaggcacctggctgagcctggctggcacagaaacctctactaaaaagaaggaaaatgatctgagtcccaggagctgcccagagttgctgggagctgaaaaatcacatcctggcctggcacatcagaaaggaatgggggcctcttcaaattagaagacatttatactcttttttcatggacactttgaaatgtgtttctgtataaagcctgtattctcaaacacagttacacttgtgcaccctctatcccaataggcagactgggtttctagcccatggacttcacataagctcagaatccaagtgaacactagccagacactctgctctgcccttgttccctaggggacacttccctctgtttctctttccttggctcccattcactcttccagaatcccaagacccagggcccaggcaaatcagttactaagaagaaaattgctgtgcctcccaaaattgttttgagctttccatgttgctgccaaccataccttccttccctgggctgtgctacctgggtccttttcagaagtgagctttgctgctacaggggaaggtggcctctgtggagccccagcatatgggggcctggattcatttcctgcccttcctcagtttaatccttctagtttcccacaatataaaactgtacttcactgtcaggaagaaatcacagaatcatatgattctgcttttaccatgcccctgagcaatgtctgtgctagggaaactccccgtcccatatcctgcctcagcccgccaaggtagccatcccatgaacacactgtgtcctggtgctctctgccactggaagggcagagtagccagggtgtggccctgccatcttcccagcagggccactcccggcactccatgcttagtcactgcctgcagaggtctgtgctgaggccttatcattcattcttagctcttaattgttcattttgagctgaaatgctgcattttaattttaaccaaaacatgtctcctatatcctggtttttgtagccttcctccacatcctttctaaacaagattttaaagacatgtaggtgtttgttcatctgtaactctaaaagatcctttttaaattcagtcctaagaaagaggagtgcttgtcccctaagagtgtttaatggcaaggcagccctgtctgaaggacacttcctgcctaagggagagtggtatttgcagactagaattctagtgctgctgaagatgaatcaatgggaaatactactcctgtaattcctacctccctgcaaccaactacaaccaagctctctgcatctactcccaagtatggggttcaagagagtaatgggtttcatatttcttatcaccacagtaagttcctactaggcaaaatgagagggcagtgtttcctttttggtacttattactgctaagtatttcccagcacatgaaaccttattttttccaaagccagaaccagatgagtaaaggagtaagaaccttgcctgaacatccttccttcccacccatcgctgtgtgttagttcccaacatcgaatgtgtacaacttaagttggtcctttacactcaggctttcactatttcctttaaaatgaggatgattattttcaaggccctcagcatatttgtatagttgcttgcctgatataaatgcaatattaatgcctttaaagtatgaatctatgccaaagatcacttgttgttttactaaagaaagattacttagaggaaataagaaaaatcatgtttgctctcccggttcttccagtggtttgagacactggtttacactttatgccggatgtgcttttctccaatatcagtgctcgagacacagtgaagcaaattaaaaaaaa

SEQ ID NO: 1871 - DNA, 2786 bp, Homo sapiens
agcactctccagcctctcaccgcaaaattacacaccccagtacaccagcagaggaaacttataacctcgggaggcgggtccttcccctcagtgcggtcacatacttccagaagagcggaccagggctgctgccagcacctgccactcagagcgcctctgtcgctgggacccttcagaactctctttgctcacaagttaccaaaaaaaaaagagccaacatgttggtattgctggctggtatctttgtggtccacatcgctactgttattatgctatttgttagcaccattgccaatgtctggttggtttccaatacggtagatgcatcagtaggtctttggaaaaactgtaccaacattagctgcagtgacagcctgtcatatgccagtgaagatgccctcaagacagtgcaggccttcatgattctctctatcatcttctgtgtcattgccctcctggtcttcgtgttccagctcttcaccatggagaagggaaaccggttcttcctctcaggggccaccacactggtgtgctggctgtgcattcttgtgggggtgtccatctacactagtcattatgcgaatcgtgatggaacgcagtatcaccacggctattcctacatcctgggctggatctgcttctgcttcagcttcatcatcggcgttctctatctggtcctgagaaagaaataaggccggacgagttcatggggatctggggggtggggaggaggaagccgttgaatctgggagggaagtggaggttgctgtacaggaaaaaccgagataggggaggggggagggggaagcaaaggggggaggtcaaatcccaaaccattactgaggggattctctactgccaagcccctgccctggggagaaagtagttggctagtactttgatgctcccttgatggggtccagagagcctccctgcagccaccagacttggcctccagctgttcttagtgacacacactgtctggggccccatcagctgccacaacaccagccccacttctgggtcatgcactgaggtccacagacctactgcactgagttaaaatagcggtacaagttctggcaagagcagatactgtctttgtgctgaatacgctaagcctggaagccatcctgcccttctgacccaaagcaaaacatcacattccagtctgaagtgcctactggggggctttggcctgtgagccattgtccctctttggaacagatatttagctctgtggaattcagtgacaaaatgggaggaggaaagagagtttgtaaggtcatgctggtgggttagctaaaccaagaaggagaccttttcacaatggaaaacctgggggatggtcagagcccagtcgagacctcacacacggctgtccctcatggagacctcatgccatggtctttgctaggcctcttgctgaaagccaaggcagctcttctggagtttctctaaagtcactagtgaacaattcggtggtaaaagtaccacacaaactatgggatccaaggggcagtcttgcaacagtgccatgttagggttatgtttttaggattcccctcaatgcagtcagtgtttcttttaagtatacaacaggagagagatggacatggctcattgtagcacaatcctattactcttcctctaacatttttgaggaagttttgtctaattatcaatattgaggatcagggctcctaggctcagtggtagctctggcttagacaccacctggagtgatcacctcttggggaccctgcctatcccacttcacaggtgaggcatggcaattctggaagctgattaaaacacacataaaccaaaaccaaacaacaggcccttgggtgaaaggtgctatataattgtgaagtattaagcctaccgtatttcagccatgataagaacagagtgcctgcattcccaggaaaatacgaaaatcccatgagataaataaaaatataggtgatgggcagatcttttctttaaaataaaaaagcaaaaactcttgtggtacctagtcagatggtagacgagctgtctgctgccgcaggagcacctctatacaggacttagaagtagtatgttattcctggttaagcaggcattgctttgccctggagcagctattttaagccatctcagattctgtctaaaggggttttttgggaagacgttttctttatcgccctgagaagatctaccccagggagaatctgagacatcttgcctacttttctttattagctttctcctcatccatttcttttatacctttcctttttggggagttgttatgccatgatttttggtatttatgtaaaaggattattactaattctatttctctatgtttattctagttaaggaaatgttgagggcaagccaccaaattacctaggctgaggttagagagattggccagcaaaaactgtgggaagatgaactttgtcattatgatttcattatcacatgattatagaaggctgtcttagtgcaaaaaacatacttacatttcagacatatccaaagggaatactcacattttgttaagaagttgaactatgactggagtaaaccatgtattcccttatcttttactttttttctgtgacatttatgtctcatgtaatttgcattactctggtggattgttctagtactgtattgggcttcttcgttaatagattatttcatatactataattgtaaatattttgatacaaatgtttataactctagggatataaaaacagattctgattcccttcaaaaaaaaaaaa

SEQ ID NO: 1872 - DNA, 307 bp, Homo sapiens
gcgagtctggaactctttcttcggggccccggggcacaccatggaggtctcctgttgaatggcccttgttgccctagagtgggacccagccctcacctcccccagagctaacctgggaggtgctgaaggggcattgggccaccgtaagcaagggaaaaagggcagatcatgcggggagatgaccttgatctttgattgctaccctaaccttgacctttaacccgtgattcccccagctcctggagagatgtctaatatctcttagggaccagaccctaaattctctctccccatttgatgttagtgg

SEQ ID NO: 1873 - DNA, 428 bp, Homo sapiens
tttttttttttttttttttccgaaaacatcggatttattaggattagctgtagtgtacactgattcctttagctctaaatggatacatatgtgccccgcagacagtatacacgcagggatgtgactgagccacagtgacatagcaaacccaacagctggcttgtgaagccatcgtgatcccaacaaggtctatgttagcaattggtgaaagaagaagagagtgagatgggacccaggtgggcctggaggtgggatcctgtgggttttcagagcacccaccagtgctcccttggtgagcccagcaccacctggaagtggagggaagctgggtcgctgctggaagggagagaggctgactctctacccctcacctctgcaaggaactgaggcctgtagggttgcggctgtcactggctaacaggtctgtt

SEQ ID NO: 1874 - DNA, 409 bp, Homo sapiens
tttgatgacttaataatgtaatttatttgaaatacttccagaaaagtttaaggccattatacaaaaacattcatttcatcaaaacattcattgaccaccttcccataggccaacacttgacaaacctcttttcccaacacactggctgatggcttctaaaagtggctgatggcgcctacaaagaatcattcattcttttcttcaccagtaaaggctgttcttggctttcctctgcttctgtctgcagcaggttcacttgctgtatcaataacgacttgagaaagcagttttaaataaacttgtaatagaaaaaattcatcatgtttaagacctataaatacagaaatatgttttacagggtaaaattgatcacaatatccttgttttcaaaaaataataaagtatatac

SEQ ID NO: 1875 - DNA, 1496 bp, Homo sapiens
tcactaaagggaacaaaagctggagctccaccgcggtggcggcccctcagaactagtggatcccccgggctgcaaggaattcggcacgagcgcgcgtcctgcccgtctgtccccgcgggggtcgcccgccacagcccgcggaatgaccacccagcagatagacctccagggcccggggccgtggggcttccgcctcgtggggcgaaaggacttcgagcagcctctcgccatttcccgggtcactcctggaagcaaggcggctctagctaatttatgtattggagatgtaatcacagccattgatggggaaaatactagcaatatgacacacttggaagctcagaacagaatcaaaggctgcacagacaacttgactctcactgtagccagatctgaacataaagtctggtctcctctggtgacggaggaagggaagcgtcatccatacaagatgaatttagcctctgaaccccaggaggtcctgcacataggaagcgcccacaaccgaagtgccatgccctttaccgcctcgcctgcctccagcactactgccagggtcatcacaaaccagtacaacaacccagctggcctctactcttctgaaaatatctccaacttcaacaatgccctggagtcaaagactgctgccagcggggtggaggcgaacagcagacccttagaccatgctcagcctccaagcagccttgtcatcgacaaagaatctgaagtttacaagatgcttcaggagaaacaggagttgaatgagcccccgaaacagtccacgtctttcttggttttgcaggaaatcctggagtctgaagaaaaaggggatcccaacaagccctcaggattcagaagtgttaaagctcctgtcactaaagtggctgcgtcgattggaaatgctcagaagttgcctatgtgtgacaaatgtggcactgggattgttggtgtgtttgtgaagctgcgggaccgtcaccgccaccctgagtgttatgtgtgcactgactgtggcaccaacctgaaacagaagggccatttctttgtggaggatcaaatctactgtgagaagcatgcccgggagcgagtcacaccacctgagggttatgaagtggtcactgtgttccccaagtgagccagcagatctgaccactgttctccagcaggcctctgctgcagcttttctctcagtgttctggccctctcctctcttgaaagttctctgcttactttggttttccctctgcttgtaaaacattgaggcccctccctgccttggttaattgactcacaccagctgtgggatgcccgcttttacaattaaaggaaaactgttgtgttcagtgtcaccttgtcagcaacactgtgtcccttcgcccgccgttcttctctgctgcatttggacatcagccaaatttgaacccaatcaaatataacgtgtctgacactgattttgtttttactcaataaatgtatagactacaaaaaaaaaaaaaaaa

SEQ ID NO: 1876 - DNA, 362 bp, Homo sapiens
cttgaattaagcacagactcgtcagctcggttgctttatcatgaataatgtgtgtgaccttgcagttcttccacagttcagcaaacaagtgctagcttcactgaccaaaaattaaggaaggaaaacacagtttttaaaacgatccatcttttaacagccgaaaccgatgtgtctatggtgctgcaccttgctgttgtacttctgaaatcagacgtgtgtgaacgatcatttctgacttaaccgtgagatgctcacgagtacccttcctgttgttttgttagcattgaaatcgagactatttatttggaatatatacaacagtgtttttccactgtatttcatttgcaaaagttgagaactgc

SEQ ID NO: 1877 - DNA, 3111 bp, Homo sapiens
ggcacgagcggagagccgcgcagggcgcgggccgcgcggggtggggcagccggagcgcaggcccccgatccccggcgggcgcccccgggcccccgcgcgcgccccggcctccgggagactggcgcatgccacggagcgcccctcgggccgccgccgctcctgcccgggcccctgctgctgctgctgtcgcctgcgcctgctgccccaactcggcgcccgacttcttcatggtgtgcggaggtcatgttcgctccttagcaggcaaacgacttttctcctcgcctcctcgccccgcatgttcaggaccaaacgatctgcgctcgtccggcgtctctggaggagccgtgcgcccggcggcgaggacgaggaggagggcgcagggggaggtggaggaggaggcgagctgcggggagaaggggcgacggacagccgagcgcatggggccggtggcggcggcccgggcagggctggatgctgcctgggcaaggcggtgcgaggtgccaaaggtcaccaccatccccacccgccagccgcgggcgccggcgcggccgggggcgccgaggcggatctgaaggcgctcacgcactcggtgctcaagaaactgaaggagcggcagctggagctgctgctccaggccgtggagtcccgcggcgggacgcgcaccgcgtgcctcctgctgcccggccgcctggactgcaggctgggcccgggggcgcccgccggcgcgcagcctgcgcagccgccctcgtcctactcgctccccctcctgctgtgcaaagtgttcaggtggccggatctcaggcattcctcggaagtcaagaggctgtgttgctgtgaatcttacgggaagatcaaccccgagctggtgtgctgcaacccccatcaccttagccgactctgcgaactagagtctcccccccctccttactccagatacccgatggattttctcaaaccaactgcagactgtccagatgctgtgccttcctccgctgaaacagggggaacgaattatctggcccctggggggctttcagattcccaacttcttctggagcctggggatcggtcacactggtgcgtggtggcatactgggaggagaagacgagagtggggaggctctactgtgtccaggagccctctctggatatcttctatgatctacctcaggggaatggcttttgcctcggacagctcaattcggacaacaagagtcagctggtgcagaaggtgcggagcaaaatcggctgcggcatccagctgacgcgggaggtggatggtgtgtgggtgtacaaccgcagcagttaccccatcttcatcaagtccgccacactggacaacccggactccaggacgctgttggtacacaaggtgttccccggtttctccatcaaggctttcgactacgagaaggcgtacagcctgcagcggcccaatgaccacgagtttatgcagcagccgtggacgggctttaccgtgcagatcagctttgtgaagggctggggtcagtgctacacccgccagttcatcagcagctgcccgtgctggctagaggtcatcttcaacagccggtagccgcgtgcggaggggacagagcgtgagctgagcaggccacacttcaaactactttgctgctaatattttcctcctgagtgcttgcttttcatgcaaactctttggtcgttttttttttgtttgttggttggttttcttcttctcgtcctcgtttgtgttctgttttgtttcgctctttgagaaatagcttatgaaaagaattgttgggggtttttttggaagaaggggcaggtatgatcggcaggacaccctgataggaagaggggaagcagaaatccaagcaccaccaaacacagtgtatgaaggggggcggtcatcatttcacttgtcaggagtgtgtgtgagtgtgagtgtgcggctgtgtgtgcacgcgtgtgcaggagcggcagatggggagacaacgtgctctttgttttgtgtctcttatggatgtccccagcagagaggtttgcagtcccaagcggtgtctctcctgccccttggacacgctcagtggggcagaggcagtacctgggcaagctggcggctggggtcccagcagctgccaggagcacggctctgtccccagcctgggaaagcccctgcccctcctctccctcatcaaggacacgggcctgtccacaggcttctgagcagcgagcctgctagtggccgaaccagaaccaattattttcatccttgtcttattcccttcctgccagcccctgccattgtagcgtctttcttttttggccatctgctcctggatctccctgagatgggcttcccaagggctgccggggcagccccctcacagtattgctcacccagtgccctctcccctcagcctctcccctgcctgccctggtgacatcaggtttttcccggacttagaaaaccagctcagcactgcctgctcccatcctgtgtgttaagctctgctattaggccagcaagcggggatgtccctgggagggacatgcttagcagtccccttccctccaagaaggatttggtccgtcataacccaaggtaccatcctaggctgacacctaactcttctttcatttcttctacaactcatacactcgtatgatacttcgacactgttcttagctcaatgagcatgtttagactttaacataagctatttttctaactacaaaggtttaaatgaacaagagaagcattctcattggaaatttagcattgtagtgctttgagagagaaaggactcctgaaaaaaaacctgagatttattaaagaaaaaaatgtattttatgttatatataaatatattattacttgtaaatataaagacgttttataagcatcattatttatgtattgtgcaatgtgtataaacaagaaaaataaagaaaagatgcactttgctttaatataaatgcaaataacaaatgccaaattaaaaaagataaacacaagattggtgttttttcctatgggtgttatcacctagctgaatgtttttctaaaggagtttatgttccattaaacgatttttaaaatgtacacttgaaaaaaaaaaaaaaaaa

SEQ ID NO: 1878 - DNA, 210 bp, Homo sapiens
gcacccctgaaatcaattccatatcatgtttgaatgccatacattttgcacatgtactgtacataagtaatgcatactgtatttttatatgtgtgcacatttatcatcagatcttttgtacatagtggcagtattgtagctgatcgggaaatgtttgatatctcagcaattttgcatttttgtgtctcaaataaaagacattttgatgta

SEQ ID NO: 1879 - DNA, 439 bp, Homo sapiens
actttggttccagcatcctgtccagcaaagaagcaatcagccaaaatgatacctggaggcttatctgaggccaaacccgccactccagaaatccaggagattgttgataaggttaaaccacagcttgaagaaaaaacaaatgagacttatggaaaattggaagctgtgcagtataaaactcaagttgttgctggaacaaattactacattaaggtacgagcaggtgataataaatatatgcacttgaaagtattcaaaagtcttcccggacaaaatgaggacttggtacttactggataccaggttgacaaaaacaaggatgacgagctgacgggcttttagcagcatgtacccaaagtgttctgattccttcaactggctactgagtcatgatccttgctgataaatataaccatcaataaagaagcattcttttcca

SEQ ID NO: 1880 - DNA, 270 bp, Homo sapiens
  misc_feature: n=a,t,g or c
ctggtgcctaccaaggtgaggtctttatggtgtatagagattggtgagtttcagagccagtntggccagtctagtccctcccctttccctagcccagcacaattccctccattgagggcccacatcacctccagagggaggagggaggggtcagacccccccatagcaccaatctggataggccactctctgacaaaacagagcgagcagtgccttccacaaacggggtaaatggggctaagaaggggggaggccttttcctgtgggaga

SEQ ID NO: 1881 - DNA, 7071 bp, Homo sapiens
gccgcctcctcggccagtggcgtagccgaatcggtgtcgcggccagccagataggggcggaggtccggaacccagtctggacccgagcggggggccatggagaaagcggcccgaggcgctgtttacaccgactagcgcgggcccgttgcggctgcaggcaccatggaccgagcccccacggagcagaatgtcaagctgtcagctgaggtggagccatttattccccagaagaagagtcctgatacatttatgatccctatggctctcccaaatgataatggaagtgtttctggtgtggaaccaactccaattcccagctacctgattacttgttacccatttgtgcaggaaaaccagtccaatagacagtttcctttatataacaatgatatacgatggcaacaacccaatccaaaccctactggaccatactttgcctatcccattatatctgctcagccgcctgtttctacagagtatacatattatcagctgatgccagcaccatgtgcccaggttatgggtttctatcatccttttcctacaccttactccaacacctttcaggctgcaaatactgtaaatgctatcaccacagaatgcactgagcgtccaagtcagcttggacaggtcttcccattgtccagccatcgaagcagaaacagtaacagaggatcagtggtcccaaaacaacagcttttacaacagcacataaaaagcaaaaggccgctggtgaaaaatgtagctactcagaaagaaacaaatgcagcaggtcctgatagtcgatcaaaaattgtgcttctggtagatgcttcacagcaaactgatttcccatcagatatcgctaacaagtctctctcagagaccactgcaacaatgctctggaagtccaagggcaggagaagaagagcatcccaccctactgctgaatcttctagtgagcagggggctagtgaagccgacattgacagtgatagtggttactgcagtcccaaacacagcaacaaccagcctgcagcaggggctttgagaaatcctgattctgggaccatgaatcatgtggaatcatctatgtgtgcaggtggtgtaaattggtccaatgtaacttgccaggcaactcagaaaaaaccttggatggaaaaaaatcagacattttctagaggtggaaggcaaactgaacaaagaaataattcacaggttggattcagatgccgaggacacagtacttcctcagaaagaagacagaatttgcaaaagagaccagataataagcatttaagctctagtcaatcccatagaagcgatccaaattctgagtctttatattttgaggatgaagatgggtttcaagaactaaatgagaatggaaatgctaaggatgagaatattcaacaaaaactttcttctaaagtattggatgatttacctgaaaactcaccaatcaatatagttcagactccaattcctattaccacctcagttcccaaacgtgcaaaaagtcagaagaagaaagctttagcagcagcccttgccacagctcaagagtattcagaaataagtatggagcaaaaaaaattacaggaagctttatcaaaagcagctggaaaaaagaataaaacacctgtgcagctagatttaggggacatgttagctgctctggaaaaacaacagcaagcaatgaaagcacggcaaattactaacaccagacctctgtcatatacagtggttactgcagcttcttttcacactaaagactctactaatagaaaacctttaaccaaaagtcagccctgtttgacatcctttaattctgtggacattgcttcttctaaagcaaaaaaaggaaaagagaaggaaattgcaaaactaaaacgacccacagcacttaaaaaggttattttaaaagaaagagaggaaaagaaggggcgcttaactgtggaccacaatcttttgggatccgaggaaccaacagaaatgcacttagattttattgatgacttgccacaggagattgtttcccaggaagatactggactaagcatgcccagtgatacttcactctctccagcaagtcagaactctccatactgtatgacacctgtgtcacaaggctctcctgctagttctggaataggcagtccaatggcatcttcaacaataaccaaaatccacagcaaaagatttagagagtattgtaatcaggttctttgtaaagagattgatgaatgtgtgactcttcttctccaagagcttgtcagtttccaggaacgcatctaccaaaaagatcctgtaagagcaaaagcaaggagacgactcgttatgggtctaagagaagttaccaaacatatgaagttaaacaagatcaagtgtgttataatttctccaaactgtgaaaaaatccagtcaaaaggtggtctggatgaggctctctataatgttatagccatggcacgggaacaagaaattccttttgtgtttgcccttggaaggaaagctctaggacgctgtgtgaacaagctggttcctgttagcgtagtgggaatcttcaactactttggtgctgagagcctgtttaataaattagtagaactcactgaggaggccaggaaagcatataaagatatggttgcagcaatggaacaggagcaggctgaggaagccttaaagaatgtgaagaaggtaccacaccacatgggacattctcggaatccctctgcagcaagtgccatttctttctgcagtgttatttctgaaccgatctctgaagtaaatgaaaaggaatatgaaacaaattggagaaacatggtggaaacttcagatggactggaagcatcagaaaatgagaaagaggtatcctgtaagcacagcacttctgaaaaacccagtaaacttccatttgacacacccccaattggtaagcagccatcattagtggctacaggcagtactacctcagctacaagtgctgggaaatccacagcaagtgataaagaggaagtgaagccagatgacctggaatgggcctcacagcagagtacagagactggctctttggatggcagttgccgagatcttttgaattcctccatcaccagcaccaccagcactcttgtacctggcatgcttgaagaagaagaagatgaagatgaggaggaggaggaagattatactcatgaacccatatctgtagaagtgcagctcaatagtagaattgagtcttgggtctcagagacccagagaactatggaaacccttcagcttggaaaaacccttaatggttctgaggaagacaatgtagagcaaagtggagaagaggaagcagaggcgcctgaggtgctggagccagggatggacagtgaggcatggactgctgaccagcaggccagtcctgggcagcagaagtccagcaactgcagctcgctcaacaaagagcactctgattctaattacacaacgcaaactacgtaactcaggaaatgtcggctctctatctccagctgtggaagggttgcagccattaccttttatgcttcatctcaacattttgcactgtccagtatttaatatacgtatttaattcccaacaaatatttttgtagcttttacttgttatgatctgtagcttagcttttaattagtatctaagtgtctttctaagaactgtgtggaaaattcagatctgtttcagcttattttgtaatcaaaaacagtgataaaaagaagaccagatcttaaagaaaataaatttcaaatgcttacttaaaagacattttgaaagttaaagaacaaggttctaaggatagaagcagttatcagtgtttgcttcaggactccacctcctctactctaatttgaccaaaaaattgtttgggcttctttaaaaaagaactgggggtggagtcagaaaattaaatgaaaggctgagggtaactaagtccaccagtgttgtatgttaaaaaatcaatgcaacttttatgtggtccacaaatgtttagtcagaagtcactgattattgtaattaattagtgttgggatgggctaaaacagagccttcaaaacttcggctagcagtggagccaccatcttagattatagctagctagcctcatttgtggaaagtgatagatgctgtctataatagtgaacagtcacccatgataggacctccaggttctgtctcatatttgcttcttacttacctcaggaatgctcttgtacatagacttatttacaaaaagctaggcacatgttgacaggtgaataactgtaaccgattgtatgactgctgcacttacatgtaaactcttcagaaacagagtcttatactggtgtgttctcttgcatgcttctggttcaggactcttgatttgagatatggatttgattgagtatccaaacttgtcctgagtgcaaaactgtttcaccttttaaaaaatacctattttgcacctagccttgagcaccttccacatagcaatgaccatagttactgtcaggaggtcaaggaaaggaactttgcacaacttgtgacatgtatcctgataatcaaggcttagaggaggaagttttagaagataagagaaagttgttctaattgtgctgaaactattagatgatttagagtatacagatatgtaggtattaattctctattcactattatttatctctgcccttctctaggagtttgtatacctgcttaggagacaataaatgagctaaatgttttatttgctagtcagtcaccacctggacttcagtgactttacaagtttatgtaatggtggaagaatgacaaactatgtaatttttttgtcttccatccaactccccaccacccccaactgtcccccccacccccctcacacacatgcacacatccgtacgtgtgtgtgttttccacttacaagcttccataagcaggcacaaaactgagaaggaaggggtattatccctgccctgattatctggggcagggctttgcctcacagaggcaggagagaagaattgggcagattctttactgaactcattgggactactgtgctagttttgatgttttataatgctggcatttaattactggagagattggattcttggttgatgatttagtatttgtgaattgtgaaagttcaggagctgtgtagaaaatgttagtcaatcaactttattattgtgctaaaaggggacattcttatactgtcctgtctaaactgttctccagtatagacttcctaggcactaaatatccaatatttaaaggaacacagcaggtaaggaatgaagcctctgaaatagtactcatggatttatacatggcagatcttactgtctctacacatttggaagtgttcgttggtttaaagaaatgatagaggttttgaactactgacagtcttaaaagtgaatttaaaaactgttcatactttttatggtgtaaatttcctttgctcgatgtcagtgattcagataactcttgaccttgagatgatggcttttcacaggtttcttatattttatatctcttctgaacatgaattgtcattttagatttttgacatttgtatcaaaagagaagttgaggaaatcttcagaacactggtaacttttagttttgctatagacttcagaagtgtttatttatatgttcggtaaatgctctcgcatatgcagtacctcttctgccagcaaatccaagggaccatagcctttttatgagacaggtcacctctagaggacaccccaagaattattaaaggaaatgttaccattttgagagcatgcttaaataaatattaataatgtctttataacttgtttcctttaaattttggaatattgaattacaggctttggaggagttgtgaaaattaggaaagtttttatatattttttgaagtgggcatggttggctctttgaagacctataaagagatccagtgggaagagtaagggttggttcatcatcacaagaaataaaaaacatagtgattttttctcttaatgtgtagaggtggttttactggcaataattaataatagatttctatttcagtatgtaagcatattaactaaaatatgaattacacttccaaagttagatttctgcttcagtaggtttgtttgctgtgaagattacttctcaaaagacagatgttcatattagcttaattttcggtttaaatatgtttgtaaatgatgtaatatatttcttttgactaaatgtggaaaagtaatgtgtgttatacattgagaagtttttactggctttgactggaggttgtttttgcagagatggtattttatatgattccagtatttggaaaagaattagtcaaaaggaattcacatagtttaaatactgagaaattaatatccaaatatgtacttgtctgatttctaaataagctgggggaggagggaggggtgggaattgaaatgtgcaaatgagtagtgaatgctacactcattttcaactctttaacatgaaactgttcaatcttaacacattgttactttaatatatgtataaagaagtattactgtttgtaaagctgctgtttgcttaaaaaaaaaaaacacccttgtcatgtattttctgtatgttgggccaacaggttagaacatcaactcatttaaaaatttttatctttttttgatttaaaaaaattctgtgaaataatttatttacagacatcttcctcctccctcatcccttccaacctttacatacatcacagaatcaaccaaactgtttgcctaatctgaaatctgaatcctaatgagaaaaatttaaattttgttggcacatcacaccttgaaagtatttgtattattttataatttaatttctaaatataccacataagtttataatttaatgtcttaattgtaatgctctaataaaaaactagcaaaattagtgtgagttataacatgaagggattttcatcttttgctgtatgaaggataattgttatatcacatttggggggtaataacagcttttttgcactatgtaaatactagtggggattcttctgtactaataaaatgattattgaaatg

SEQ ID NO: 1882 - DNA, 3178 bp, Homo sapiens
  misc_feature: n=a,t,g or c
agttgagcgcagtcgccgctccagtctatccggcactaggaacagccccgggggcgagacggtccccgccatgtctgcggccatgagggagaggttcgaccggttcctgcacgagaagaactgcatgactgaccttctggccaagctcgaggccaaaaccggcgtgaacaggagcttcatcgctcttggtgtcatcggactggtggccttgtacctggtgttcggttatggagcctctctcctctgcaacctgataggatttggctacccagcctacatctcaattaaagctatagagagtcccaacaaagaagatgatacccagtggctgacctactgggtagtgtatggtgtgttcagcattgctgaattcttctctgatatcttcctgtcatggttccccttctactacatgctgaagtgtggcttcctgttgtggtgcatggccccgagcccttctaatggggctgaactgctctacaagcgcatcatccgtcctttcttcctgaagcacgagtcccagatggacagtgtggtcaaggaccttaaagacaagtccaaagagactgcagatgccatcactaaagaagcgaagaaagctaccgtgaatttactgggtgaagaaaagaagagcacctaaaccagactaaaccagactggatggaaacttcctgccctctctgtaccttcctactggagcttgatgttatattagggactgtggtataattattttaataatgttgccttggaaacattttgagatattaaagattggaatgtgttgtaagtttctttgcttacttttactgtctatatatatagggagcactttaaacttaatgcagtgggcagtgtccacgtttttggaaaatgtattttgcctctgggtaggaaaagatgtatgttgctatcctgcaggaaatataaacttaaaataaaattatataccccacaggctgtgtactttactgggctctccctgcacgnattttctctgtagttacatttaggntaatctttatggttctacttcctntaatgtacaattttatataattcngnaatgtttttaatgtatttgtgcacatgtacatatggaaatgttactgtctgactacancatgcatcatgctcatggggagggagcaggggaaggttgtatgtgtcatttataacttctgtacagtaagaccacctgcaacaagctggaggaaccattgtgctggtgtggtctactaaataatactttaggaaatacgtgattaatatgcaagtgaacaaagtgagaaatgaaatcgaatggagattggcctggttgtttccgtagtatatggcatatgaataccaggatagctttataaagcagttagttagttagttactcactctagtgataaatcgggaaatttacacacacacacacacacacacacacacacacacacacacacacacacacacagagtaccctgtaactctcaattccctgaaaaactagtaatactgtcttatctgctataaactttacatatttgtctattgtcaagatgctacantggannccatttctggttttatcttcanagnggaganacatgttgatttagtcttctttcccaatcttcttttttaanccagtttnaggnncttctgnagatttgnccacctctgattacatgtatgttctngtttgtatcatnagcaacaacatgctaatgncgacacctagctctnagngcaattctgggagantganaggnngtatanagtnncccataatctgcttggcaatagttaagtcaatctatcttcagtttttctctggcctttaaggtcaaacacaagaggcttccctagtttacaagtcagagtcacttgtagtccatttaaatgccctcatccgtattctttgtgttgataagctgcacangactacatagtaagtacagancagtaaagttaanncggatgtctccattgatctgccaantcgntatagagagcaatttgtctggactagaaaatctgagttttacaccatactgttaagagtccttttgaattaaactagactaaaacaagtgtataactaaactaacaagattaaatatccagccagtacagtattttttaaggcaaataaagatgattagctcaccttgagntaacaatcaggtaagatcatnacaatgtctcatgatgtnaanaatattaaagatatcaatactaagtgacagtatcacnnctaatataatatggatcagagcatttattttggggaggaaaacagtggtgattaccggcattttattaaacttaaaactttgtagaaagcaaacaaaattgttcttgggagaaaatcaacttttagattaaaaaaattttaagtanctaggagtatttaaatccttttcccataaataaaagtacagttttcttggtggcagaatgaaaatcagcaacntctagcatatagactatataatcagattgacagcatatagaatatattatcagacaagatgaggaggtacaaaagttactattgctcataatgacttacaggctaaaantagntntaaaatactatattaaattctgaatgcaatttttttttgttcccttgagaccaaaatttaagttaactgttgctggcagtctaagtgtaaatgttaacagcaggagaagttaagaattgagcagttctgttgcatgatttcccaaatgaaatactgccttggctagagtttgaaaaactaattgagcctgtgcctggctagaaaacaagcgtttatttgaatgtgaatagtgtttcaaaggtatgtagttacagaattcctaccaaacagcttaaattcttcaagaaagaattcctgcagcagttattcccttacctgaaggcttcaatcatttggatcaacaactgctactctcgggaagactcctctactcacagctgaagaaaatgagcacacccttcacactgttatcacctatcctgaagatgtgatacactgaatggaaataaatagatgtaaataaaattgagntctcatttaaaaaaaaccatgtgcccaatgggaaaatgacctcatgttgtggtttaaacagcaactgcacccactagcacagcccattgagctancctatatatacatctctgtcagtgcccctc

SEQ ID NO: 1883 - DNA, 471 bp, Homo sapiens
catgaggcctcttgccacactccagaaatacgtgtgcggctgcttttaagaactatgtgtctggtcacttatttctctaaaattatctcattgcctggcaatcagtcttctcttgtatacttgtcctagcacattatgtacatgggaaatgtaaacaaatgtgaaggaggaccagaaaaattagttaatatttaaaaaaatgtattgtgcattttggcttcacatgtttaactttttttaagaaaaaagttgcatgaatggaaaaaaaaatctgtatacagtatctgtaaaaactatcttatctgtttcaattccttgctcatatcccatataatctagaactaaatatggtgtgtggccatatttaaacacctgagagtcaagcagttgagactttgatttgaagcacctcatccttctttcaatgcgaacactatcatatggcattcttactgaggattttgtctaacc

SEQ ID NO: 1884 - DNA, 298 bp, Homo sapiens
ttttttttaaagtaacatttaatgaatacacatttataaaagccatcatcccttaacatggggaaagtgtacaaaaataatgtgaaagtgtaaaaatttttctagaatacaggaaacatatcagcagtaaagaagtttagtttaactttttttttaaatgtaaaatagtttggatctgttaaaaggaatacagttcgcccaaagcacttattttcatctgttgtaaactcattctttctaccttaagtaaactggaggagtcagctgtgttaatatggtcaaattaatttcatagttt

SEQ ID NO: 1885 - DNA, 526 bp, Homo sapiens
  misc_feature: n=a,t,g or c
tttttttttttaggaagagagaaatcatttaatgtggtaagccagtaagatttaagngctnnnnnnnnnnnnnnnnnnnnnnnnnnnnnnnnnnnnnnnnnntntcanatccagcttctgaataagctcaagaactttaacttctatccctatggcctatgcccaggggaagatgggacttaaagggtgtttgtagaaatcatggtagaaaaacttacatacatatgtgtatatatatatagatacaaaaaaaaactatacatatttaaaaatactgcaaggttgtggtttcctgagcaggatggattgggcagacaaaatcagcaatgcccctgctcctgagagaggcctcgccatccctgttccntaagtcttgagtctgcacggttctctgagtcatattgggatccctgatcatctgcagccgggtgtcctaggagcagccacatggnggggggcgaggctcagcggctgggttaggntttctcntaagggttgnatagggggcttcggttaggcccctggt

SEQ ID NO: 1886 - DNA, 305 bp, Homo sapiens
taacaaacaaaactttattttcctttaatacaaaattaaatagcaaggggttttctttgtacagtgataaattagaaatttacagtacagacatcgatgcagacatacttttgtacatccttaaaagcagggtccatttcctttgaaatttagcaattcattcagggcatgtgtagcaggaagtttgcctggtacctctttgtcaaacatctgaaagtcccccagattggcttcaaggttcctggagctgtggggtggcatgaggacccaagaaaggccacagagcatccagcccgactgctgca

SEQ ID NO: 1887 - DNA, 395 bp, Homo sapiens
aacagtagacaataaacttttatttaagaaaactgattcagttgtgttggaaaaaataaagaaatctgatattaaacgttttctaagatcatttgtataggttcagtgtattcataagaagtccaccctgagatgcctgtaaaagtcaaatcgtaattacacttcaaactttaatcctaaattattgacagatagatagatagtgaccaacttaagggtaatcatatatgtgactaacatttgggaggaaacaggaaaacagtggtctcaaaacaacaatatcccagtctccatttgaaagagcatagatcttcggtaaatcattttgaaaactatgtgctttatttcccaaaagatcaaacttaatttttaaaagacacccttttcagaagtat

SEQ ID NO: 1888 - DNA, 292 bp, Homo sapiens
  misc_feature: n=a,t,g or c
tgtgcttttgacactttatccgtttttatttaaaaacatgctaaaaacatggtgttccataaagccaggaccaggatgaaggaacgcacagatacggcaatgcaagcagaaagtgcatctgaaaccaacaagcgtgctcaccctgctctccctcccgtgctgcccgggggangcaaggtgggcaaggagggggcaggaagcccccatggcctcacctcctgagtccccaatcagggcagggaggccaggccccaccctggactattgactcactgcagtggggaggaggaaa

SEQ ID NO: 1889 - DNA, 385 bp, Homo sapiens
aaatgaaatctatgaatttttttattaaggatttgataagctgatataatgaaaacatgtaaatgaaaaacatttacactgactgtacgactagtgtgctaagccattacaatagtttactgacataactggcaagagtaacttggaaaataacttaatccagcagaacaaaaacatcctcagaaaaacatcctcagtagtactgaatatatctctctcatatatctatctatctatctatctatatatatatatatatatagctttgcacaatcagggagcaaggcaccataatgaaatgagcatacatttatgcagaagaaaataatagcaacaaagctgcgagaaaaattgtaacttcatcttcactgagctgtgcataatc

SEQ ID NO: 1890 - DNA, 340 bp, Homo sapiens
ttttatttcaaaaattattttcacacatgattatcatacagtattacaatgtattatgtgcaaaattccatttaaaaaatcatttacaaaaggtaaacccgtatgtgctgagggttctagttcaacaaaagcccaggctaaaaaaggtacaaggtacaaagccaaccaaatgagatgactatgcatctttacacagtacaataacatgtttttgtaactacctgtgttacgtggatacaagaccctcatagtttgtgcacctgcaaactggttttatttaacataagtttaatttcactgcaggttctgataatgtagattgatttttttgtgcattttc

SEQ ID NO: 1891 - DNA, 264 bp, Homo sapiens
tttagcattttatcctcatttttaacctacaaagtgtaatgttctcataaagtattttaataaatatattaaggcttaaggtaattactggtttgagtggcgggtggtttgctttctagcacactagtttacattcggaatcttaaaaatgaaaacatttgccatcttacagtgagtgatacatcacattggcttgccccagtttttgtgttcttttttttttttttcactattcaacatgtcttcgtattatcttccctcgtg

SEQ ID NO: 1892 - DNA, 495 bp, Homo sapiens
  misc_feature: n=a,t,g or c
tgaaagtataaaaatcattttactttaatacaaaatcacataaagaaaggcatgttggctaaatcaaatattcactaaatatcagtgaagtcaccactggaatctcaatagcacattttcctgctttcttttctcccttctgctaaccattgaagaccagggtcatccgtgggagcagatgagtaggacacgcgtctgcacgctggaggccctgggggttgacatgggagcaggaagtggacccccccaccctgcacatcccttctgtttttcttgatttcagtctcactggcccaggcaaatcttcaagggtgtctagttctgcagccagggagaaagtgatgccaagagaacctcgtctcctccctcctcagtctgctttgaagggggaaataaatacacagggcctagtgtggtctggtggtgggcacaggggaaggtgggtttttggccagggcatctttgggaaaggttgtccttcntaggaattcagga

SEQ ID NO: 1893 - DNA, 319 bp, Homo sapiens; identical to SEQ ID NO: 439

SEQ ID NO: 1894 - DNA, 433 bp, Homo sapiens
gaaattttctaatgaattttattatcaccagcatctttaaaaattaagaggaattctctgagagtatatataaaaaagaaattaaaggcaaatattttgctgttaaggatttaaaaataaacagaaacatagagtataaaattttcatttcactgtcccctcatttaaaattataagaatataagcaaataacatccaatgtcagaagagattcagggtgaccatttgcagtatttagtggcaaattagtagcatcatgaaaaatttcaattcatttaaaaaaatagctttcatttaaataataattacgtttagctttatctctgtatataattagactttcttttggcttagacaattccattttctccaactgggagctgtgaaggatcaagtcctactttcttcattgatacggcaatatcaaataaat

SEQ ID NO: 1895 - DNA, 580 bp, Homo sapiens
  misc_feature: n=a,t,g or c
ggcagttgaggcaggagacatcaagagagtatttgtgccctcctcgggttttaccttccagccgagattcttcccctctctacaaccctctctcctcagcgcttcttctttcttggtttgatcctgactgctgtcatggcgtgccctctggagaaggccctggatgtgatggtgtccaccttccacaagtactcgggcaaagagggtgacaagttcaagctcaacaagtcagaactaaaggagctgctgacccgggagctgcccagcttcttggggaaaaggacagatgaagctgctttccagaagctgatgagcaacttggacagcaacagggacaacgaggtggacttccaagagtactgtgtcttcctgtcctgcatcgccatgatgtgtaacgaattctttgaaggcttcccagataagcagcccaggaagaaatgaaaactcctctgatgtggttggggggtctgccagctggggccctccctgtcgccagtgggcacttttttttttccaccctggctccttcagacacgtgcttgatgctgagcaagttcaataaagattcttggaagtttan

SEQ ID NO: 1896 - DNA, 358 bp, Homo sapiens
tatctgctttttgctgctagtttcaaactgccagtatttttccttttgcttttaaaatagttacaatatttttcatgatagccacagtattgccacagtttattataataaagggtttttatttgatttagcgcattcaaagcttttttctatcacttttgtgttcagaatataacctttgtgtgcgtgtatgttgtgtgtgtgcatgtgtggcgtatatgtgtgttacaggttaatgccttcttggaattgtgttaatgttctcttggtttattatgccatcagaatggtaaatgagaacactacaactgtagtcagctcacaatttttaaataaaggataccacagtgcaaaaaaa

SEQ ID NO: 1897 - DNA, 391 bp, Homo sapiens
aattcggaacgaggcgaaacgtggatgtctacacgaaagtctgcaaatatgtggactggatccaggagacgatgaagaacaattagactggacccacccaccacagcccatcaccctccatttccacttggtgtttggttcctgttcactctgttaataagaaaccctaagccaagaccctctacgaacattctttgggcctcctggactacaggagatgctgtcacttaataatcaacctggggttcgaaatcagtgagacctggattcaaattctgccttgaaatattgtgactctgggaatgacaacacctggtttgttctctgttgtatccccagccccaaagacagctcctggccatatatcaaggtttcaataaatatttgctaa

SEQ ID NO: 1898 - DNA, 288 bp, Homo sapiens
aaaaataaagcctctttattggtacctgtaagctcaggtacaaggtgttcccacaagcacacaggctggcaaggcctcctgggcaaggggcaggcccagagcctgcgtttcttggcacagacacagagagaaatggaataaattatagttctgacactcagggacaatgtagaaattatgatgcaaaattaaacattagcaaacaaagggtataaaaaccctcaggagccacccctcgccaactggcctcagggcatgggcaggtgggccacggttgaagtgcagtgc

SEQ ID NO: 1899 - DNA, 415 bp, Homo sapiens
cagttggttcttctgcaaggctgtgatacctgcaaagatatgtaaaatctaatttttctttttttttttttttttgctacagtctttagactaagcatgcaagacatacgactaagtgcaactgagtgaaatgttttttttttaaattttaatcattccctaaaggtttgaactgaggtatgcgtactaacagtttctcatgctgttatctttactcatgtctagctacacatgctgagaatgaactaatctaccagatttttatcctcttttgaataccaaactaaccagcaaccactcagtttagaagcacagggcccccttcccatgaccctgtctggctactgcgtgcacatcatgaagctgcctggaaaagttttttttttttttttttttttttttttttttttttttt

SEQ ID NO: 1900 - DNA, 412 bp, Homo sapiens; identical to SEQ ID NO: 456

SEQ ID NO: 1901 - DNA, 411 bp, Homo sapiens
ttctcccgcttatgaacatgtatttttatttgccgaatgaaaatcgtggtgtgttgctttgatgaatggaatttcaggctctccctgtgcacagccggtgggcaaaggtcaccttaaatgactttttctccctatctgtctgttaatccccagaccggttgcattttccagttgcttcctgggtgtctgtacatagtttgtctttgtataggagtgagtgtggtgaccgtcaatcccctaatctcccaggttctaatttaacagatgatggctgtatgaggaaaacgatgtaaatagagaatacaaattaaactggatctctgtggcctaggttttgtacatacagaaactgcatggtatttaaattattgtttgtctctgatgatgtatgcagtttcttttaaaacaaac

SEQ ID NO: 1902 - DNA, 386 bp, Homo sapiens
cttaaaaccaactttccatccgagaagcctcctcagtagttactctgctcatgagacagatctgggctccaagccaggaaaggtgaacagaaaccacaagtgtccagccctcggtgctggagtggacgttaattgtcagccaccagactgtcccggcacctacagagaatgtttcacagttctggcatttaaatcctttgatagtggattgtgctgctgttagccttagtttcagtgctttacaagtctcgcttattatctcattggtatttaggtatacaaaacagttgattattcaccacgccaatatctgggtctctgtatctcatgtagaacataagaaaatgggaactaatagggaactttatttatagcatgaaaataaa

SEQ ID NO: 1903 - DNA, 702 bp, Homo sapiens
  misc_feature: n=a,t,g or c
ttagattttatgaacaacttttattaacagaaatcaaacttattgtccaaagtgacaatatatcaaagaaatacataccaaaacctgctgccattatagttgttaacatttttattgcatatttacaatgtgtggaacattataaggatttacagtagaagccaaatttcccagcccttaaaattttaataggaaaaatcgaataaaccatacatatttttgaaaatgagcattagaaacacacagatgattataattctatagactaatacaggtgaatgctgtatgtaatagaacagctgggagaggtaaaagagtggataagagagtcatcagagtgtgaaaaaactacagctgggtggtattgaataaagagacaatattgaaaatatttttaaacgctaaaatgtcccgtaaaagcatagctatcccctatgcnaaactgtgaggtagaatttttcccaccccgttttctgctcttctggccaccatttgggggacttccctgtccaggtgactctctctcacatagctgtacctggggcttactagccatacatgctttccactaccccctcaacctcatcacagaaataacctttcnggtccatgatccngcctaccttaccactgaaacgggtggtgnaagttagtacctnaccaaccngtggnggttcctcnagctacctatcccnagggtgg

SEQ ID NO: 1904 - DNA, 321 bp, Homo sapiens
cttcaattgatgcaactcagtaatttttattgcaactggaagacaatacatcacagaaactttatggtaggtctggggaaaagtgttatttacaataaatgatgaaatagtttgtctttggcaatatgattacatacgaagaatgcaaaatgcaggtatggatgccttccaagcaacaccaagtccctagagttcggctgatcgcgcctgcctccacactgtttctttaggtttacatgaacataacagaacatcacgttctttctcctttatggttctccctttctattcatgatattggcagtttcatacagaaaatac

SEQ ID NO: 1905 - DNA, 417 bp, Homo sapiens
gatattctgccactccagtttattgaaatgagtaaatttatagctttatttgcatacagaaaagtgcatgagaaaataagtatgtacaaaacagttgtgtggctgatcatgactttcaaaaattcaactacctagaaatagttacctccagtttagcacatttaggtatttggacatttaaagtactatttcaagtctgtgtttatagtgactgagtaggaagctgatagaaaattatgccatatatgatcaactattaccattaaacataaaaccacaggactttctacttggggctaatcaatagagggtcatgtggcccctgtcttgtttagcttctgagcatcaccctcttcttccccctcaaggtaacattggatgtggctgattaactcccacaagaacctgagcattaag

SEQ ID NO: 1906 - DNA, 248 bp, Homo sapiens
atattttcatttttcatcctaatttactgaagccattttctttggttagctttagaattatctttctttatactaaccagcttagcatgtaataattcttgcccatgtgactacaaaacattagatatctccacaaataaaaacgagattcaccaacacaaatattccttctctttaagttcacaaaatgcaagaagaaaagaaaaatgatgttaggttgtcagtaaggaaagcatttctagatgaga

SEQ ID NO: 1907 - DNA, 417 bp, Homo sapiens
ttttttttttttgagatggagttttgctcttgttgcccaggctagagagcaatggtgcaatctcggctgactgcaacctccgtctccggggttcaagcaattcttctgcttcagcctcctgaacagctgggattacaggcgtgcgccatcatgcccagctaattttgtatttttagtagagatgggtttatacatttttaaagaatggacaatgatgcagatgatttgtgagcattttgatgagaaagtggtgattagaaggatacagcataaatttaattgtaaacatgcttatctagctaacctaatctgtttctgtagaattactggtcatgggagattggatagatgcctaacctatctcaattttaagtaatgtgagcaagtctttaaggtatacataatgataaaatggag

SEQ ID NO: 1908 - DNA, 302 bp, Homo sapiens; identical to SEQ ID NO: 451

SEQ ID NO: 1909 - DNA, 375 bp, Homo sapiens
ttttctgtgaataggtttattaagaccacctaggagaacctctttggcaactaccacaaattctaggccatttaaaatccaggccaagttcatatttgctctccatgatcaccattacaacaaccacaggtcacacagtattacagaacaaaagcatggtcactttattttacccaaatgcaaatcgtttttcacaaccaagacttttttctttcctacaatgttacaaatgatgtatccaagtccgactgtaatttggagttaaacagggatcatagaaccaaggaattatctctgaagctgctctttgggccactgtgccaccccaacagctctatcctgttgttctttttttaaattaaaaaatcattaaaa

SEQ ID NO: 1910 - DNA, 221 bp, Homo sapiens
  misc_feature: n=a,t,g or c
aaggtttgaacatcaaattttaatcttgaaaccttttatccagtcctcaaattattaacatgaaaaggagtgataaattgcaattttatcattaccatatcactgtgtaacaagcccttgttacaaaatctccctctactgtctgcaaaaaaccaatagaaaacccatacattatattacctaatganctattaacagatgaaattttaaccaactttata

SEQ ID NO: 1911 - DNA, 206 bp, Homo sapiens
gctgccaccaccatgaaagagtggccaccacatctttattgcatactcaggtgaataacttattatacaatgaacactcctccattaggagaccatgcccacttacagaatgcagccgtaaatgcggtaaatctatttacagaggttggggtgcaagatgagagaagtatcagccccaggaatttgaagtgaaaatgatctacaaa

SEQ ID NO: 1912 - DNA, 426 bp, Homo sapiens
ggtggcaatagagagagttatgctacaattatttcttggtttccacttgcaatggttaattaagtccaaaaacagctgtcagaacctcgagagcagaacatgagaaactcagagctctggaccgaaagcagaaagtttgccgggaaaaaaaaagacaacattattaccatcgattcagtgcctggataaagaggaaagcttacttgtttaatggcagccacatgcacgaagatgctaagaagaaaaagaattccaaatcctcaacttttgaggtttcggctctccaatttaactctttggcaacaggaaacaggttttgcaagttcaaggttcactccctatatgtgattataggaattgttgtggaaatggattaacatacccgtctatgcctaaaagataataaaactgaaatatgtcttcaca

SEQ ID NO: 1913 - DNA, 329 bp, Homo sapiens
ttctatatcatatctttattgactccttaataactactacaagctcacttgtgaatcacacctgatgtacaataaataagtcacaattctgaaccacatctatagaaacttgaattcctagtaaatataataattgaggatcttaaagctcaacaagtcaggccttccagtttttcagatgaggaaattaaggcctaaagatatgaagtgacttaccccaaagtaaaagatctagttagtaataggagctgagattgagatccatgacttttaaaacccagattcatgctctctccactaaaccatgtgatcattctaggtagtcaaca

SEQ ID NO: 1914 - DNA, 296 bp, Homo sapiens
  misc_feature: n=a,t,g or c
aacagaaagaaaaaagttcctggacaccagacccacatatggtatttacaaatttggtgtgaaccctgcctctggttctgcccagagctgaagagtgaatctattacagagatcagagctgtcaggataattatcaagtgcagtaaaaaatagcattttgaaaaaaatatatacctttagtattgcctttctagaattaactataagcaagaaaaacttattttttaaagangaaaagaatacttttncactcttacttataagagctggttgtagcagcactactaaagctagtt

SEQ ID NO: 1915 - DNA, 273 bp, Homo sapiens
taacttcacaggaaatttattattttttgaaagggctgagggagactttacaagggtctgaagctggtaactagaaagaaagataaataaaatacgaagccagtatgttgtggcaatattcgagaaaacacactgaaaaaaatctttacagtttaaaactgcttcactttatacataattacaaatgaatatacagcatctgggttttaacccgtcttttttatttaataggatttagcacacaaatgtccatagagcatttgcaaacaagca

SEQ ID NO: 1916 - DNA, 409 bp, Homo sapiens
ttttttttttttttttttttttttgggtttgatgattttatttctcccttcccataaccagtaaaaaaaaaaaaaaaaattacaatcaggcctggtggtggctcacgcctgtgatctcagcactttgggaggctgaggtgggcggattgcttgatctcaggagtttgagaccagcctgagcaacacagcgagacctggtctcaaaattattatacaatcaatgcaagtacaaagattcaatttttaaaaatcaccagagtacaaagacggccacagcccctgcccgggtttaacttacatatatacagagtgggcggggcaggcatggccacagaggtggtattacaaaatatacaaagtggtttctttctttacatttcatagaagaagcctgcctcatttccaaatg

SEQ ID NO: 1917 - DNA, 460 bp, Homo sapiens
  misc_feature: n=a,t,g or c
ttttttttttttttttgaggatgcaattctaccagntctttatttcttaagtggccaatttgattgagaaagtgacaaagcagcagtgaacctctaaaccaattaataaaagtcctctacttacaatccaaaccagtaacctcatcattgtccttatcccaggnaaggcacagggttagacagcaggacagaggaaaacagaggaacacagtcagnaaaggggcatcaacagggacagtntcagnacagcagtgcagggaanttttgcaaatctggattccagggttntaggacggactgttntcccccaccccttcgttattaaacagggnctcattacatgtgggacccagttntggggccatccctggggttttcaatgtttcgctgttttctcacatgggaggnttttctgggtaactcancttcaggcagcaggtttttgggcaatttttcccaa

SEQ ID NO: 1918 - DNA, 4043 bp, Homo sapiens
cgaagcgggtcctgccccgctgtcagctgcggcccccggcgccgggcgggggtggccgcgaccattggcggagaggcgaaaggggcggggccgccgccagccgctgcgggcaaggctgaacaggcggaggtgggcagccggccagggaagcacggtccaggcggctacattcggcccggccatggcagcggcgcccctgaaagtgtgcatcgtgggctcggggaactggggttcagctgttgcaaaaataattggtaataacgtcaagaaacttcagaaatttgcctccacagtcaagatgtgggtctttgaagaaacagtgaatggcagaaaactgacagacatcataaataatgaccatgaaaatgtaaaatatcttcctggacacaagctgccagaaaatgtggttgccatgtcaaatcttagcgaggctgtgcaggatgcagacctgctggtgtttgtcattccccaccagttcattcacagaatctgtgatgagatcactgggagagtgcccaagaaagcgctgggaatcaccctcatcaagggcatagacgagggccccgaggggctgaaactcatttctgacatcatccgtgagaagatgggtattgacatcagtgtgctgatgggagccaacattgccaatgaggtggctgcagagaagttctgtgagaccaccatcggcagcaaagtaatggagaacggccttctcttcaaagaacttctgcagactccaaattttcgaattacggtggttgatgatgcagacactgttgaactctgtggtgcgcttaagaacatcgtagctgtgggagctgggttctgcgacggcctccgctgtggagacaacaccaaagcggccgtcatccgcctgggactcatggaaatgattgcttttgccaggatcttctgcaaaggccaagtgtctacagccaccttcctagagagctgcggggtggccgacctgatcaccacctgttacggagggcggaaccgcagggtggccgaggccttcgccagaactgggaagaccattgaagagttggagaaggagatgctgaatgggcaaaagctccaaggaccgcagacttctgctgaagtgtaccgcatcctcaaacagaagggactactggacaagtttccattgtttactgcagtgtatcagatctgctacgaaagcagaccagttcaagagatgttgtcttgtcttcagagccatccagagcatacataaagtgaatcatgcaacgtgttgggggaagttctgcctttctgatcaatcttttgggttcacgtggaaaccaggacttggcaacatgatgtttgactgtaatctcatcacggatatgtatgaatttttacaggttcgtttttgaattgtgagaggcagttcattagcaaagatgtactgggcagtaactaaacacacatgcaaacatgtgaatggtggtttattcctcattctgtggatgtttctatgagccaaaatttgatgtctttttttcaaaattgcttatgaaatttccacacaatcgtagcttataagattggaacgatctcagccaaatattttaggtgtaattcatatgtatttgagtggaggattttttttctcatttttctagtgttaaattttaaccagcattaacatggtagagtggaggagtgagtgtgttcaaagatcaacatatttaacttttaaacactatctcaaagccagcataattaactactttgattgtgggctgacctttgtttttttaacaatcaggcatttttaattagataatccactcatgtatttccccctcactgcagttgtctgcatttttagcctcttttctcttcgttagttgtcagaatatgcctttgtcaaggctcagaggtaacaagacagaaaattcatctgggattttcctgctgtggctggcacattcttctgattaacagacacttgtatgatgctttaggctagttagtgcattttttagcaaacatttatcttaaacatcacagatccactggggggtgcaaggggctactgttagtcctcttgttagatgcagtcactcctcctggtcacctagtgagcagggacagagccaggagtcaagtgcagtgccaaggtgcatgaccctctgagaagtcactgggctgatttgacctccgactcattggttgtgtaaatgccatgtgcagcctttcctgaggccataggagggcttcctgcagctgagatctatgcaggccatcctctcaacaggtgccactccaagggcggtcctcggtgcagcagcatcagcttcacttgtgggggggtgggggaaggggcggtctcagaaatgcaggttcccaggtcccaccctggacttctgaaggggtgtggcatctgtgtttctgatgcttactacaatatgtgaaccactactttagaaaatctgctttaacttggtattcctctaattgtgttccctaggaaatgactgtcccaagagccagtgattattccaggtgttccctggaaaggtcaagtgagtctgggaaacactatgtctgtacacctcttgaaggtgtcgaatgtatgtttatacatcagtggaacccatttttctagcctagcaagtcccaaacacattacactgaagagattttggtgaggaaacttgctggagttttcagggaacactgttctaggcttaggtgaccttaggatcactcaagtagacccttcactccctgcgagaaattaggatgaataactacctgtggcattgttggttctgaacttttacagttcaggcctgctgtgaatctttgatgaagctttaaggtgacactgttgtacaagatgtcagctttgctgaaacgcacattacctggaataagtgctttaattgtagaattagaatgggatttactgtactgttttaaatgagattggcttcagaatccattacagttaccttacatagcacttgatacgtgttaaatgaacatatgaatgtaatttatatattcctagaatttaagttactttgtgagatttgggcctgtccctcaatgccagtttaggatttctttttttctataccttgaaatgattataaaatagattttcatgggaattttaaaaactctatccaaaacatttttggagcattttaaagccccatacacagaagtatacgaaagcacacaaaacactccaagtttcagcagttttagcgccaccattaacccactttgcttgtctcatgaaaaatctttgttaaagtttgtacacaggtaacaaaaagttactttaaaagatatataaagggctgtaagctaattgtggtgtctagtaagtagcataatgagatgtgaggagttggaactttgcgtgttttgcgtattttcatctgcattcagcttcttactctgggtttgtactcgagtgttatttctttacaaatgcccttgtaattaccactctgaagtctgctgactgtgtctcttgaacatacttaggatattctgcacattatggaaaaaggtaaattttagaagtttctgctctactaactgtagatatttatgactctgcgagttatctatttttataaccacctgtggtccattgttcattttaattcacatttcttatgaagtatggtaacagggagggagacacctagattagcagctcaatttgtactacttcagccaatctgtgaatgtaaaaactacactgttgccttgctaggatccaccctcctataatatggaacaaatatctgaatgaaatccaccctaggagacggagtcaaactaaacttgtggtttttcatttaacttttgactacagcatggccccatggcatccacaccaagagggtgttgtgatgaggtgccggtgtgcaaagggaactttagtttttccactggttcttatctgctagccttttacatacatgtgtactatatttgtttatagactgtaggtggatatataatttaaaagcttgatttaataaacatttaaccccctaaacttgggg

SEQ ID NO: 1919 - DNA, 377 bp, Homo sapiens
  misc_feature: n=a,t,g or c
tttttttttgctgcaccaaatttaagaacgccctttcaggcaagcagtggtctctagctgttaaaacatttcgttagtggatcacaatagcttctaaaactgcctttctagtaaaggccatcagagaggtaatactaaactgtgcatttgccaaataagaatatgaattgtataaaagctcatttccaatcctagatcaaatggcaaaagttctacaaagttggtttccatgtttgtataaaagctccgactgattttatgtattttgctatgaaattacctttgggtcttataatcagtatacctctactcaggaatgtgcaaatgattttatacagcacgacgctagtaccgctctgtatgacagtaaggttttt

SEQ ID NO: 1920 - DNA, 358 bp, Homo sapiens
tttttttttttcccgtgtatatttaacaatatatatttatatatattttctaaatcagtacattcagtttttaacttgtttttttcttcacaaacagaagaactcttacaatagtagactttctaaaataaatactattaaaatagagcttcaaaataaatattctatacagagaaaacctgtggcaactttgtggtggggtggaaatgggctacagtgagggggaaatgaagttgggatgtggcggggtgggagcctcgagcttttctgtttgtaacatgaaaccaagctgtgggacagtaagaagagaaagcaaggcaagacactgcacgcagttacccacagcagaaaatggcaa

SEQ ID NO: 1921 - DNA, 7869 bp, Homo sapiens
ggcacgaggtttggggcatctccgcggtccggcccggggccccgggatctcggctgtccttcctcccggcataagatgcacatttttctgctctggagccgggaatgaaatattcttgagttcttacaactttatgacgagacccatgtgtggtgctattgagaaattcattgggaagttggaagacatttcaaacaacaggttgttttggtttctatagtacaattggggtggcattctgttttgtgaaaggaggaaggacttaggccagaaaactcatatgctatggttaactggttcccagcctccgagaatcttgttttccatggtgtaaaacttactcagcatcaggataagggataacgactctatggatatacagaatccttcaccatggtaaaactcgcaaacccgctttatactgagtggattttggaggccatcaaaaaagtgaaaaagcagaaacagcgtccttcagaagaaaggatatgcaatgctgtgtcttcatcccatggcttggatcgtaaaactgttttagaacaattggagttgagtgttaaagatggaacaattttaaaagtctcaaataaaggactcaattcctataaagatcctgataatcctgggcgaatagcacttcctaagcctcggaaccatggaaaattggataataaacaaaatgtggattggaataaactgataaagcgggcagttgagggcttggcagagtctggtggctcaactttgaaaagcattgaacgttttttgaaaggtcagaaggatgtgtctgcattattcggaggcagtgctgcctctggctttcaccagcagttacgattggctatcaaacgtgccattggccacggcagactccttaaagatggacctctttatcggctcaacactaaagcaaccaacgtggatgggaaagagagttgtgagtctctttcctgtttacctccagtgtcccttcttccacatgaaaaggataagccggttgctgaaccaatccccatctgtagtttctgtcttggtacaaaagaacaaaaccgagaaaagaagccagaggaactcatctcctgtgccgactgtggcaacagtggccatccatcctgtttaaagttttcccctgaactaacggttcgagtgaaggccttacggtggcagtgcatcgagtgtaaaacatgcagctcctgtcgagatcaaggcaaaaatgcggataacatgctcttttgtgattcatgtgaccgaggttttcacatggagtgttgtgatccgccactcacccgtatgccaaaaggcatgtggatatgtcaaatatgtcgacctaggaaaaaaggacgaaaacttctacaaaagaaggcagcacagataaaacggcgctatactaatccaataggacgtccaaaaaacaggttaaagaaacaaaacacggtatcaaaaggtcccttcagcaaagttcgaactggccctggaaggggtaggaaacgaaaaatcactctttccagccaatcagcatcatcatcatcagaagaaggatatttagagcggatagatggcttggacttctgcagagatagcaatgtctccttgaggttcaacaagaaaaccaaagggctcattgatggccttaccaaattttttaccccttcccctgatgggcggaaagctcggggggaagtggtggactactctgagcaatatcgaatcagaaagaggggcaacaggaaatcaagcacttcagattggcccacagacaatcaggatggctgggatggcaaacaagaaaatgaggagcgactttttgggagccaggaaatcatgactgagaaagatatggaattatttcgtgatatccaagaacaagcactgcagaaagttggagtgactggtccccctgatccacaagtccgctgtccctctgtcattgagtttgggaagtatgaaattcacacctggtactcctccccatatcctcaagaatactcaaggctgcccaaattgtatctttgtgaattttgtctaaaatatatgaaaagtagaactattctgcagcagcacatgaagaaatgtggttggttccatcctcctgccaatgagatttacagaaagaataatatttctgtctttgaggttgatgggaatgtgagtaccatttattgtcaaaacctgtgtcttttggcaaagttgtttcttgaccacaaaaccctctattacgatgtggagccatttcttttttatgtactaacacagaatgatgtcaagggctgccaccttgttggctacttttctaaggaaaagcactgccaacagaagtacaatgtttcctgtataatgattcttcctcaataccagcgtaagggctatggcaggtttctcatcgatttcagttatttgttatcaaagcgtgaaggccaagcagggtctccagagaaaccgttatctgatctgggtcgtctttcctacatggcatattggaaaagtgtaatattggagtgcctttatcaccaaaatgacaagcagatcagcattaagaagttaagcaagttgactggaatctgccctcaagacatcacttccacactccaccacctacgaatgctggacttccgtagtgaccaatttgtgattatccgccgggaaaaacttatccaggatcacatggcaaagcttcagctgaatttgcgacctgtagatgtagatccagaatgtttgcgctggactccagtcatagtgtccaactctgtggtctcagaggaggaagaagaggaggctgaggaaggagaaaacgaagagccacagtgccaggaaagagaattagagatcagtgtgggaaagtctgtgtctcatgagaacaaagaacaagattcttattcagtagaaagtgaaaagaaaccagaagttatggctccagtcagttctacacgtttgagcaaacaagtccttcctcatgatagtcttcctgcaaatagccagccatctcggaggggccgctgggggaggaagaacagaaaaacccaggaacgttttggtgataaagattctaaactgctcttggaagagacgtcttcagctcctcaggaacaatatggagaatgtggggagaaatcagaagccacccaggaacaatacactgaaagtgaagaacagctggtggcttctgaggagcagccaagccaggacgggaaacctgaccttcccaagagaagactcagtgagggggttgagccctggcgaggacagctcaagaaaagccctgaggctctgaagtgcagattaacagaaggaagtgagaggctgccccgtcgctacagtgagggtgacagggctgtcctcaggggcttcagtgagagcagcgaggaggaggaggagccggaaagccctcggtcaagctcgccaccaattctcacaaagcccacgctgaagcgaaagaaaccatttctccaccgaaggaggagagtccgaaagcgcaaacaccacaatagcagtgtagtcacagaaactatttctgagaccactgaagtgttagatgaaccttttgaagattctgactccgagaggccaatgccaagattagaacccacatttgagatcgatgaagaagaggaggaagaggatgaaaatgaacttttccctagagaatacttccgtcgtttgtcttcgcaggatgtactcaggtgtcagtcctcttctaagaggaagtctaaagatgaagaagaagatgaagagtcagatgatgctgatgacactcctatcttaaagccagtatctcttttgcgaaaacgtgatgtgaagaattctcctcttgagccagatacatccacacctttgaaaaagaaaaagggatggcccaaaggcaagagccgcaaaccaatccactggaagaaaagacctggtcgaaaaccaggatttaagttgagtcgggaaatcatgccagtttctactcaagcatgcgtcattgagcccatcgtttccattcctaaagctggacgtaaacccaagatccaggagagtgaagaaactgttgagccaaaagaagacatgcccctacccgaggagaggaaggaggaggaggagatgcaagcagaggcagaagaggctgaagagggtgaggaagaggatgcagccagcagtgaagtcccagcagcctctccagcagacagcagcaatagtcctgagaccgaaaccaaggagcctgaggtggaggaggaagaagagaagccccgtgtctcagaggagcagaggcagtcagaggaggagcagcaggaattagaggagccagagccagaggaggaggaagatgcagctgcagagactgcccagaatgacgaccacgacgctgatgatgaggatgatggccacctggagtccacaaagaaaaaggagctagaggaacagcccacgagggaagatgtcaaggaggagcctggtgttcaagagtcttttttagatgctaatatgcagaagagtagggaaaagataaaggataaagaggaaaccgagctggattccgaagaggagcagccttcccatgacacgtccgtggtgtcagagcagatggctgggtctgaggacgaccacgaagaagactcccacactaaggaagagttaatcgaattaaaagaggaggaagagattcctcatagtgagctggatctggaaactgtacaggcagtgcagtctttgactcaagaagaaagcagtgagcatgagggcgcctaccaggactgtgaggaaactcttgcggcgtgtcagaccctgcagagttacacccaggctgacgaggaccctcagatgtccatggttgaagactgtcatgcgtcagaacataatagccctatctcctccgttcagtctcaccccagccagtcagtccgttcggtcagcagtcccaacgtgcctgcccttgagagtggctacacccagatcagcccagaacaaggatccctgtccgcaccctctatgcagaacatggagaccagccccatgatggatgtgccttccgtatcagaccactctcagcaggtggtggacagcggcttcagtgacctgggcagcattgagagcaccactgaaaactatgagaacccaagcagttacgactccacgatgggcggcagcatctgtgggaacagctcttcccagagcagctgctcctacggtgggctgtcgtcctccagcagcctcacccagagcagctgtgtggtcactcagcagatggccagcatgggcagcagctgcagcatgatgcagcagagcagcgtccagcctgctgccaactgcagcatcaagtcacctcagagctgcgtggtggagaggcctcccagtaaccagcagcagcagccgccaccaccgcctccacagcagccacagccgccgccgccacaaccacaaccagcaccacagcctccaccaccccagcagcagccgcaacagcagccgcagcctcagccccagcagcctccacccccaccccctccccagcagcagcccccgctgtcacagtgtagtatgaataacagtttcaccccagctcctatgatcatggagataccagaatctggaagcactgggaacataagtatctatgagaggattccaggggattttggtgccggcagctactctcaaccatcagccaccttcagcctagccaagctgcagcagctgaccaacaccattatggaccctcatgccatgccttatagccattctcctgctgtgacttcctatgcaaccagtgtttctctgtccaatacaggactggctcagctggctccatctcatcccttagctgggactcctcaagcacaagccaccatgacgccacccccaaacttggcatccactaccatgaacctcacatctcctctgcttcagtgcaacatgtctgccaccaacattggcattcctcacacgcagagattgcaagggcaaatgccagtgaaggggcacatttccatccgctccaagtctgcgccactgccctctgcggctgctcaccagcagcagctgtatggccgtagcccatcggcagttgccatgcaggctggccctcgcgcactggctgttcagcgtggcatgaacatgggggttaatctgatgcctactcccgcctataatgtcaattccatgaatatgaacaccttgaatgccatgaacagctatcgaatgacacagcccatgatgaacagcagttaccatagtaaccctgcctacatgaaccagacagcacagtatcctatgcagatgcagatgggaatgatggggagccaggcctatacccagcagcctatgcagcctaaccctcatgggaacatgatgtacacaggcccctcccatcacagctacatgaacgctgctggcgtgcccaagcagtcactcaacggaccttacatgagaagatgagcaagatgaacttgcaatcaaaaacttaaatatatataaataaaggaaccttttatactgacaaaccagagaaaaatggacctttttccagttaaaatattgctgtagatttagaggaatttttctttggtttattttattttttagaaaacctgatcttctcttttttttgggttcattttgttgtgggttttggttttcttcacaatcttgaacattttacagtagaactcatctaaaaatggatttggggatggggaaacatgcacaaaatcttttcataattaaaaagagccttactttctttacataccacatggacagaatttgtgtaaaagtgaattatctttattttaaaatgtatgtttcccctcactgtttgcagctcccaatgttgtcatttttaaatgttatatacatctcaagggttaaccagaccctttcctccaaacccaacctttcatttcctacttcattccagcaggaggcacttaggggagactcggatggggacatggagaacaacccaagctccttaaacttattattattgttaatattattattattattattaataaagtgaggcaggaaaatgcttctccttttaaaatcccctccactcctcacacacacacacctcttgaaacccttccccaagaatgtttctttatagacggacttcattgaaatctttgttgttcttgaatcaagtgtaatataatttttttcttcttttttaaaatattcccactcagcactcagagacacaaaaatactgtaagtctcaattaacagcagaatctcagagaaaagctgtttgcaatccaaatccagcctttggaggaatagagatggtcaattaacaatcaaaaagaggagattaacctcttgtttttttaccacctggtgaatcagccataacgcacacacacgccacccagcctcttgtttctagtatgtactttgaaatgctaactgagggtcttgatgcttgagcctttgactgataaaactcaaatagcagtccccagtgatttgcctcttaggttctttcttaaattgttggtggatgactgtacattttagtgatttgaaaaataactgacaaaccattgaaacagtttattttatgttggaagagatggcgcagatgtgtgtcagaagggagatcacggtgtgagtttcgtagctatttaagtgatacatacctctagtttttgtatgtcttttgagatcctgagttcatcccctgtgaatcagagtgcacaagcacctctcctgtgagtggctaatgagaagagggacagaccgaccaccagcacagtagggcagatctggacagcagaatgttataacgcaagttcatgtgttgctcccaactccattctcttttctctcgtgcaaccagtttgcccattctcttcctattacttgctccagggataggtaaaaaaaaaa

SEQ ID NO: 1922 - DNA, 488 bp, Homo sapiens
ttttttgcgtttaacatttttatttttaactccgctttggtagtacaaaagtcataaaagtacaaaccagacagttaaaaatacacttgacactcgaaatggtgaaaattttccttacaaatttttacatcaaggtagtagccaactcattgatgacaccaaaaagttgtccatcattagtgttttctagagaaagtctgttgtggattccctcatccttagaaaggaggaggagaaacacaagacctgtaaacatcagttgctttgggaacacaggaattctcatcagatagttcagtataaaccagtaaaaagcgtatgtgttgaaaatactgaacgcttaattttggcaaatttggaagcctgccagacaaaaaccgctcaagtatttattagaaaatatttaaaacatactcttggtatcaatacagttttaaatatttttgagtattctcttgcctgttgtattgctatttaaaaaaaagtgc

SEQ ID NO: 1923 - DNA, 6478 bp, Homo sapiens
agagcgagcaggggagagcgagaccagttttaaggggaggaccggtgcgagtaaggcagccccgaggctctgctcgcccaccacccaatcctcgcctcccttctgctccaccttctctctctgccctcacctctcccccgaaaaccccctatttagccaaaggaaggaggtcaggggaacgctctcccctccccttccaaaaaacaaaaacagaaaaacccttttccaggccggggaaagcaggagggagaggggccgccgggctggccatggagctgctgtgccacgaggtggacccggtccgcagggccgtgcgggaccgcaacctgctccgagacgaccgcgtcctgcagaacctgctcaccatcgaggagcgctaccttccgcagtgctcctacttcaagtgcgtgcagaaggacatccaaccctacatgcgcagaatggtggccacctggatgctggaggtctgtgaggaacagaagtgcgaagaagaggtcttccctctggccatgaattacctggaccgtttcttggctggggtcccgactccgaagtcccatctgcaactcctgggtgctgtctgcatgttcctggcctccaaactcaaagagaccagcccgctgaccgcggagaagctgtgcatttacaccgacaactccatcaagcctcaggagctgctggagtgggaactggtggtgctggggaagttgaagtggaacctggcagctgtcactcctcatgacttcattgagcacatcttgcgcaagctgccccagcagcgggagaagctgtctctgatccgcaagcatgctcagaccttcattgctctgtgtgccaccgactttaagtttgccatgtacccaccgtcgatgatcgcaactggaagtgtgggagcagccatctgtgggctccagcaggatgaggaagtgagctcgctcacttgtgatgccctgactgagctgctggctaagatcaccaacacagacgtggattgtctcaaagcttgccaggagcagattgaggcggtgctcctcaatagcctgcagcagtaccgtcaggaccaacgtgacggatccaagtcggaggatgaactggaccaagccagcacccctacagacgtgcgggatatcgacctgtgaggatgccagttgggccgaaagagagagacgcgtccataatctggtctcttcttctttctggttgtttttgttctttgtgttttagggtgaaacttaaaaaaaaaattctgcccccacctagatcatatttaaagatcttttagaagtgagagaaaaaggtcctacgaaaacggaataataaaaagcatttggtgcctatttgaagtacagcataagggaatcccttgtatatgcgaacagttattgtttgattatgtaaaagtaatagtaaaatgcttacaggaaaacctgcagagtagttagagaatatgtatgcctgcaatatgggaacaaattagaggagactttttttttcatgttatgagctagcacatacacccccttgtagtataatttcaaggaactgtgtacgccatttatggcatgattagattgcaaagcaatgaactcaagaaggaattgaaataaggagggacatgatggggaaggagtacaaaacaatctctcaacatgattgaaccatttgggatggagaagcacctttgctctcagccacctgttactaagtcaggagtgtagttggatctctacattaatgtcctcttgctgtctacagtagctgctacctaaaaaaagatgttttattttgccagttggacacaggtgattggctcctgggtttcatgttctgtgacatcctgcttcttcttccaaatgcagttcattgcagacaccaccatattgctatctaatggggaaatgtagctatgggccataaccaaaactcacatgaaacggaggcagatggagaccaagggtgggatccagaatggagtcttttctgttattgtatttaaaagggtaatgtggccttggcatttcttcttagaaaaaaactaatttttggtgctgattggcatgtctggttcacagtttagcattgttataaaccattccattcgaaaagcactttgaaaaattgttcccgagcgatagatgggatggtttatgcaagtcatgctgaatactcctcccctcttctcttttgccccctcccttcctgcccccagtctgggttactcttcgcttctggtatctggcgttctttggtacacagttctggtgttcctaccaggactcaagagacaccccttcctgctgacattcccatcacaacattcctcagacaagcctgtaaactaaaatctgttaccatctgatggcacagaaggatcttaattcccatctctatacttctcctttggacatggaaagaaaagttattgctggtgcaaagatagatggctgaacatcagggtgtggcattttgttcccttttccgttttttttttttttattgttgttgttaattttattgcaaagttgtattcagcgtacttgaatttttcttcctctccacttcttagaggcattcagttagcaaagaggttggagcaacaactttttttttttttttttgcacaattgtaattgacaggtaatgaagctatttgttaaaatatttgcctttttaagtaaaaaagaaaaatcagaacagggctatttgaagaattattttatacacagattctgccttgtttcatagtatgagggttgaagacggaaaacaatctaagggtctctcatttttttaattttgttttgttcagtttggtttttttttttttttgcgctgctaagaagctaaagtcatccatccttattcacgttgacagtacctagctgtaatgtttcacagagtgtgctgctattttataaacatttttataatatattattttactgcttaaattccaagtcctgaagtagatggttgagatatgagttcttcgtactggaaaagcccttccgtagtttgttttcttctggtagcatattcatggttgtttttttttttcttttttggttttttggttttttttttttcctctgatcacattcttcaaagacggagtattcttacctcaggtttactggacaaaatcaataactacaaaaggcaatgattcacgcttttgttttcataatacctcacaaccgtacagtttctgcttgggagcccattcgcatgaggaatacagaagcagtgtgagcagggctgactccctctcaggtggaaggcagggcggtctcactcccagggacctttttggtcatggaggccatcgggctcccagttagaccctggtatcctcatcatgatggaaaaaatacattgaaccaagggatcctccctccccttcaaggcagacgttcagtacaaacatttatgcggtaggctcagatgtcgtaatttgcacttaggtaccaggtgtcaggaaacagactaaaaagaattccaccaggctgtttggagatcctcatcttggagctttttcaaaagcggggcttcatctgcaaagggccctttcatcttgaagtttttcccctccgtctttcccctcccctggcatggacaccttgtgtttaggatcatctctgcaggtttcctaggtctgaatctgcgagtagatgaacctgcagcaagcagcgtttatggtgcttccttctccctcctctgtctcaaactgcgcaggcaagcactatgcaagcccaggccctctgctgagcggtactaaacggtcgggttttcaatcacactgaattggcaggataagaaaaataggtcagataagtatgggatgatagttgaagggaggtgaagaggctgcttctctacagaggtgaaattccagatgagtcagtctcttgggaagtgtgtttagaagggttcaggactttgtgagttagcatgaccctaaaattctaggggatttctggtgggacaatgggtggtgaattttgaagttttggagagggaagtggagcagccagcaagtaagctagccagagttttctcaagagccagctttgctcagcacactctcctgggccccaaggagtcccacggaatggggaaagtgggaaccctggagttcttgggaatcttggagcctaaagagaaaccgaggtgcaaattcatttcatggtgactgacccttgagcttaaacagaagcagcaaatgaaagaaccggacaaataaggaagggcacaagcctacccgactctatttacagtctgtaactttccactcttcctgtagtcccgaggcccctgggtccttctagcttttctctttcccatccttggggccttgtgtgatgatgggtgtggggctgccgatgggaaagtcgggggttgttaggcttttctgcctgctcctgcttaaacacaagaaggaatcctggattttgccctctccttagctcttagtctctttggtaggagttttgttccagaggagctctcccccttggatttgaacttgctctttttgttgttgttgttctttctcttctttttcttacctcccactaaaggggttccaaattatcctggtctttttctaccttgttgtgtttctatctcgtctttacttccatctgtttgtttttttctccatcagtgggggccgagttgttcccccagcctgccaaattttgatccttcccctcttttggccaaatcctagggggaagaaatcctagtatgccaaaaatatatgctaagcataattaaactccatgcgggtccataacagccaagaagcctgcaggagaaagccaagggcagttccctccgcagaacaccccatgcgtgctgagaggcgagctccttgaagaaggggctgttcttccaggaggccttattttgaactgcctcaggaccccactggagagcacagcatgccttactactgggtcatccttggtctatgtgctctgtactggaggctctgttctgcctcttatcagccaggtcaggggcacacatggcttaagtgacaaagccagaggagaagacaaccctgacagcatcacgctgcatcccattgctagcaggattggcaactcttcagacggagctgcgcttccctgcagtctagcacctctagggcctctccagactgtgccctgggagctctgggactgaaaggttaagaacataaggcaggatcagatgactctctccaagagggcaggggaattttctctccatgggccacaggggacagggctgggagaagaaatagacttgcaccttatgtcatgtaaataattgattttctagttcaagaagataatattggtagtgtgggaattggaggtaggaaggggaggaagtctgagtaagccagttggcttctaagccaaaaggattcctctttgtttatctctgagacagtccaaccttgagaatagctttaaaagggaaattaatgctgagatgataaagtccccttaagccaacaaaccctctgtagctatagaatgagtgcaggtttctattggtgtggactcagagcaatttacaagagctgttcatgcagccatccatttgtgcaaaatagggtaagaagattcaagaggatatttattacttcctcataccacatggcttttgatgattctggattctaaacaacccagaatggtcatttcaggcacaacgatactacattcgtgtgtgtctgcttttaaacttggctgggctatcagaccctattctcggctcaggttttgagaagccatcagcaaatgtgtacgtgcatgctgtagctgcagcctgcatcccttcgcctgcagcctactttggggaaataaagtgccttactgactgtagccattacagtatccaatgtcttttgacaggtgcctgtccttgaaaaacaaagtttctatttttatttttaattggtttagttcttaactgctggccaactcttacatccccagcaaatcatcgggccattggattttttccattatgttcatcacccttatatcatgtacctcagatctctctctctctcctctctctcagttatatagtttcttgtcttggactttttttttcttttctttttctttttttttttgctttaaaacaagtgtgatgccatatcaagtccatgttattctctcacagtgtactctataagaggtgtgggtgtctgtttggtcaggatgttagaaagtgctgataagtagcatgatcagtgtatgcgaaaaggtttttaggaagtatggcaaaaatgttgtattggctatgatggtgacatgatatagtcagctgccttttaagaggtcttatctgttcagtgttaagtgatttaaaaaaataataacctgttttctgactagtttaaagatggatttgaaaatggttttgaatgcaattaggttatgctatttggacaataaactcaccttgacct

SEQ ID NO: 1924 - DNA, 2038 bp, Homo sapiens
gcaggcccgttggaagtggttgtgacaaccccagcaatgtggagaagcctggggcttgccctggctctctgtctcctcccatcgggaggaacagagagccaggaccaaagctccttatgtaagcaacccccagcctggagcataagagatcaagatccaatgctaaactccaatggttcagtgactgtggttgctcttcttcaagccagctgatacctgtgcatcatcgaggcatctaaattagaagacctgcgagtaaaactgaagaaagaaggatattctaatatttcttatattgttgttaatcatcaaggaatctcttctcgattaaaatacacacatcttaagaataaggtttcagagcatattcctgtttatcaacaagaagaaaaccaaacagatgtctggactcttttaaatggaagcaaagatgacttcctcatatatgatagatgtggccgtcttgtatatcatcttggtttgcctttttccttcctaactttcccatatgtagaagaagccattaagattgcttactgtgaaaagaaatgtggaaactgctctctcacgactctcaaagatgaagacttttgtaaacgtgtatctttggctactgtggataaaacagttgaaactccatcgcctcattaccatcatgagcatcatcacaatcatggacatcagcaccttggcagcagtgagctttcagagaatcagcaaccaggagcaccaaatgctcctactcatcctgctcctccaggccttcatcaccaccataagcacaagggtcagcataggcagggtcacccagagaaccgagatatgccagcaagtgaagatttacaagatttacaaaagaagctctgtcgaaagagatgtataaatcaattactctgtaaattgcccacagattcagagttggctcctaggagctgatgctgccattgtcgacatctgatatttgaaaaaacagggtctgcaatcacctgacagtgtaaagaaaacctcccatctttatgtagctgacagggacttcgggcagaggagaacataactgaatcttgtcagtgacgtttgcctccagctgcctgacaaataagtcagcagcttatacccacagaagccagtgccagttgacgctgaaagaatcaggcaaaaaagtgagaatgaccttcaaactaaatatttaaaataggacatactccccaatttagtctagacacaatttcatttccagcatttttataaactaccaaattagtgaaccaaaaatagaaattagatttgtgcaaacatggagaaatctactgaattggcttccagattttaaattttatgtcatagaaatattgactcaaaccatattttttatgatggagcaactgaaaggtgattgcagcttttggttaatatgtctttttttttctttttccagtgttctatttgctttaatgagaatagaaacgtaaactatgacctaggggttttctgttggataattagcagtttagaatggaggaagaacaacaaagacatgctttccattttttcctttacttatctctcaaaacaatattactttgtcttttcaatcttctacttttaactaataaaataagtggattttgtattttaagatccagaaatacttaacacgtgaatattttgctaaaaaagcatatataactattttaaatatccatttatcttttgtatatctaagactcatcctgatttttactatcacacatgaataaaggcctttgtatctttctttctctaatgttgtatcatactcttctaaaacttgagtggctgtcttaaaagatataaggggaaagataatattgtctgtctctatattgcttagtaagtatttccatagtcaatgatggtttaataggtaaaccaaaccctataaacctgacctcctttatggttaatactattaagcaagaatgcagtacagaattggatacagtacggatttgtccaaataaattcaataaaaaccttaaaaaaaaaaaaaaaaaaaaaa

SEQ ID NO: 1925 - DNA, 478 bp, Homo sapiens
cactggtggatgtgaccaaggtatcaatgagctcacaaaatgatggcttcttcgccgtccacctcaaagagggctcagaagcagctagtaaaggagactttctcttcagcagtgatcacctgattgaaatggccaccaagctctatcgcacaactctcagccaaaccaaacagaagctcaatattgagatttccgatgagttcctggtacagttcagacaggacaaagtatgtgtgaagtttattcagggaaaccagaaaaatgggagtgtcccaacatgtaaacgaaaaaacaaccgtctccttgaagttgctgtcccttaactggcgactcctctctactttcatggacttgttcctttgtaatagtgcaatttggttttgttttatttggggttcattgtatgtttgggaatcaccaaaggcttttagagttctttggcaaaataaaaatatttgactaatcaaaaaaaaaaaaa

SEQ ID NO: 1926 - DNA, 385 bp, Homo sapiens
tttgcaaaaacaggataacaacgtcagatagcactttaatatactagaagaccaaatggaactaattttatttcatacatatattttacagtccagtagacaagatatattgtatttctctgctagtaaagtcatattctctccaaatatgtagacaagaggcttaatgtattataaaagtattatgaagagacattaagattgatgcaaactcaaaaaacacactcacacacaagacttttttttctgccatctttcaccctctaactcgcgatggctccacaaggttgacctgttacggctgttcccagacttgatcaccagctggaatacagtgcgtcacatccaggaaacgtgcaccttacatccgtcagttattgaatac

SEQ ID NO: 1927 - DNA, 466 bp, Homo sapiens
ttttttctcaagccgtttttattacacttagtgtattaagacaagtacaaaataaccttgtaattaagatactgtatcagtcaaaaaagaagtcactattgtatgaagagatttacaaatgactaaaatatacaggctgtgacagaattaacagtttgaaagagggttgcttttttcttttagaaatgctaaattttcttaacaagacaaaaatacagtgctctaaatatgcattaccatgaaaacgttaaagaaaagcagtcttaacacttaactactattaacagcctttgccaacacatgcctgcctactccctttcctaactttaaagaactgtttcctctaaggaatactagtgcagcataacccttaaataatttcatttatttttaaagttacaacctacagagaaattaacatcttgtcaatctaataacagtggcaaccattcttcacatgcacttc

SEQ ID NO: 1928 - DNA, 260 bp, Homo sapiens; identical to SEQ ID NO: 452

SEQ ID NO: 1929 - DNA, 364 bp, Homo sapiens
  misc_feature: n=a,t,g or c
taatggctcaacataatttattttttatgttaaaatgtacagagttcttttgaaagtacttgctagaaaggggaaaaaaaggtattacatacanggggnggnagggaggccggctggccagtgngcgcgtgacatggagagatacaaaggcatctaggcaccccttccccttagcttacaagtcaccatgaacaaagtacaaagaggttacaaaacaggaaaagcaaatntaaacagacaggntagacgtgggcttcctttgtacatgcggcttttagaggcatctgggngctctntttcacacacgctagngatctctttaaagagaatttatctttcttaaaatagtttttaatattctaca

SEQ ID NO: 1930 - DNA, 269 bp, Homo sapiens
aatgtgtcttaatctatccctccagctggcagttactgtttttttaatcccctgaagttgtcctgtaggagacagaaattctttgctgtctgtatcccttggagtaagaaggtagtggcatgggtggagtgtgtgttctttctccaaatctattatgatgtttattaaacacttctgtagcaaagatggtggtagttcttttgttactgaagttgcccttcaccatggctatttgaaagggagatgtacttggacgtttctgaaactct

SEQ ID NO: 1931 - DNA, 267 bp, Homo sapiens
  misc_feature: n=a,t,g or c
gcaaaatgcagtgtaccttaaaagtgtctcacctagaaggcctctacctgtaatcacattaatttttctaaagacaatttggtgttttgaagataaatgtcattagtctatgataatagcatcataggacaattagccattttagacttgaccatatttnctctttttagcatatagccatcttgatatttaggtgggagactactccaatggagcaacagtttcattttacatgattggatttagaaatttacaaattttaaactc

SEQ ID NO: 1932 - DNA, 332 bp, Homo sapiens
gaatgaaagaatccagcagatatttattaagcaagatgaaagtgaaattacaaacacaggtcaacttttaaactcagcactctgttggagtggaggtgcacggtccttcatcataggcagcctatgcgagatgcatcttaggaagggagctttcgctgctcagaaatcaaagctccatcggaggtgtcctactggaggcatcagacaacaagctaaatgacgttagggctacacaacacaaaggggaaagttgacaacaattcaggggctttgagtagtcaagacaattagcttagtacttcaggtcaataaatgctacaatttatgggcaa

SEQ ID NO: 1933 - DNA, 380 bp, Homo sapiens
  misc_feature: n=a,t,g or c
tgctcttaaccacgtttattgagaggggccgggggaaggggatggacggtcctccccgcggcggggttttcagccctcgcgggtgggcagcgtcttgtcctcaggtgtagatgctccagtctcngctcagccaaacactgtcagggcccccagcagggccttcagggcttcacggccccacggcctggggacccagctcagccacacacttctgggagccctctatgaggtggttcacggggatgcccaggctgctcagcaggagcttcangngttgagggtgccgagggggttggccagggtcccggccccggctccgccgccgactccagcgcanncnaggctgggcacagnttggcgagcccactaagaaacacacg

SEQ ID NO: 1934 - DNA, 268 bp, Homo sapiens; identical to SEQ ID NO: 398
  misc_feature: n=a,t,g or c

SEQ ID NO: 1935 - DNA, 235 bp, Homo sapiens
aaggttttaaaagcagbatttattgattgaaaataaatgtgtagataggctctcagtatggaatccatgttattttttaatgmagtacatgaagactccttagatcttccaccatgtatctbsgtgtgtgcttataacamccaccatattcaaatggvggggaattttcaacattttactgaaaaaaaaatgagaaattctyccttcagcagctctgcatagtttgacaaacttt

SEQ ID NO: 1936 - DNA, 240 bp, Homo sapiens
aaatcaatagaaattaggtagatccatttatttytyaaatacaagtataattyysgmaggggtatttsacaaattcagcattaactgccaactctatagacatgttttaacaaaaagcaaaacaaaacaaaacaaaaaaacaaaacaaggcatttactcttggccctttcagtacaggcgaagtgttctatygcatcacaagtgctagtsatgcagtaacagatccaagggcataatatt

SEQ ID NO: 1937 - DNA, 1581 bp, Homo sapiens
ataactaaattacattttcttggtcttttgactatgaaatagtttaccctagcaacatgaaaaacaagagacctaagctattagaagaaatgcagttctatgtatcttgtgtgtatagtttttccctgggtggttttcaacgaccagtgactccttagctggtttcctcagctgctagcacttgctctgggtacttgtcctcaacacgtccatctgcaacaatgtgtgcctaggaaataaactcaacttactactcacccaaccaaaatgtaattttttaaacgcagcacacactgggtggattccaaagtcatgattatgctttactatgcactctgtactattcagaccactactctcattcattactgcaattaactgcacacataactattttttattgctaattatacaccactgatttccactttaaaaaaacattagcatttgtctctaattaaatatttactgcttgtgttttacagacccgatatcaggttcttctttagactgggcttatgacctgggcatcaaacacacatttgcctttgagctccgagataaaggcaaatttggttttctccttccagaatcccggataaagccaacgtgcagagagaccatgctagctgtcaaatttattgccaagtatatcctcaagcatacttcctaaagaactgccctctgtttggaataagccaattaatccttttttgtgcctttcatcagaaagtcaatcttcagttatccccaaatgcagcttctatttcacctgaatccttctcttgctcatttaagtcccatgttactgctgtttgcttttacttactttcagtagcaccataacgaagtagctttaagtgaaaccttttaactacctttctttgctccaagtgaagtttggacccagcagaaagcattattttgaaaggtgatatacagtggggcacagaaaacaaatgaaaaccctcagtttctcacagattttcaccatgtggcttcatcaatttatgtgctaatacaataaaataaaatgcacttaatgctttaaaattcatctttttatgataaacaatattctctgtatttctctatagcattaataatcaatattaatgccattcattcagtctgttaataagaaataatatcttcaattttcaaaaacataatttgcctatctttttctgatagaagtagacattgtttatatcttcaaaaaagcaaaaggatgtcctagcaggaaataaagtggttcatatagagatgaatctcagtcctttaaataaccgatccagttctcatcagcataatgtacattaaattcaaaatagtttaatttaacctgccataatcagaagaaaccacctgctaaaacatctgtttgccggtacagacacagacaagacagtctggtcagctgtgacccctgccctcctaatggatagaaaggaaacctggaaacatactgtaagttgaggacggaaagtcatgttgaccaaaggcaatcagggtaacttgctgcatttgtaccatttatactcctattatttaagatagtattattggatagcttctccc

SEQ ID NO: 1938 - DNA, 4508 bp, Homo sapiens
  misc_feature: n=a,t,g or c
gacccaagtacgtcagggctccacggtactgttttctttcctcctaggaagatgggatttccttttgtccaagcactgaaggaaccgacccaaaccagtcttgggggctctgataagatttcagactctggacccttttccatcaggcagtgtctctgctgtatcatcccagttttgcagaggtacttgcaagccatctgacctctctcttttttttccttcagtgctggagggcagttatctcagggttccaatttatccattaataccaaccaaaacatcagcatcaagtccgaaccgatttcacctcctcgggatcgtatgaccccatcgggcttccagcagcagcagcagcagcagcagcagcagccgccgccaccaccgcagccccagccacaacccccgcagccccagccccgacaggaaatggggcgctcccctgtggacagtctgagcagctctagtagctcctatgatggcagtgatcgggaggatccacggggcgacttccattctccaattgtgcttggccgacccccaaacactgaggacagagaaagcccttctgtaaagcgaatgaggatggacgcgtgggtgacctaaggcttccaagctgatgtttgtacttttgtgttactgcagtgacctgccctacatatctaaatcggtaaataaggacatgagttaaatatatttatatgtacatacatatatatatccctttacatatatatgtatgtgggtgtgagtgtgtgtgtatgtgtgggtgtgtgttacatacacagaatcaggcacttacctgcaaactccttgtaggtctgcagatgtgtgtcccatggcagacaaagcaccctgtaggcacagacaagtctggcacttccttggactacttgtttcgtaaagataaccagtttttgcagagaaacgtgtacccatatataattctcccacactagcttgcagaaacctagagggccccctacttgttttatttaactgtgcagtgactgtagttacttaagagaaaatgctttgtagaacagagcagtagaaaagcaggaaccaagaaagcaatactgtacataaaatgtcatttatattttccaacctggcatgggtgtctgttgcaaaggggtgcatgggaaagggctgttgatattaaaaacaaacaaaacaaaaaagccccacacataactgttttgcacgtgcaaaaatgtattgggtcaagaagtgatctttagctaataaagaaagagaatagaaaacacgcatgagatattcagaaaatactagcctagaaatatagagcattaacaaagtaaaattaatatattaagttataattggaatatgtcagaagtttctttttacattcatatcttaaaaattaaagaaactgattttagctcatgtatattttatatgaaagaaaacacccttatgaattgatgactatatataaaattatattcactacttttgaacacattctgctatgaattatttatataagccaaagctatatgttgtaacttttttttagagaatagctttatcttggtttaactctttagttttattttaagaggggaaaacaaaaatatcttgcaagcagaaccttgaaaaaaaaaaagccatgaacacttattctaaatgtaaattaaaagttgagccaaactctttgtgtatatagcatcttaaatatattatcacctttgatgtaagtacctatgtattgtatggtcaccagattaaaaagtatatttttgtggattgccgccaatctggggggaaaaggcgaggtcctttattaagtattcactgtctaatatttactattttggtaaatatactgtactttggattttaattattaggccagtgttttcagaggattgtattaaggggtttctcccctcactggtgggggaatgtgtgatggttacaatggaatcttcggggctgtttgggtnggagcatcaanatattttttgggttgtggtcaataaattggaaaggggcaaaaaaaattgggggttaagtccaacccgaataagaataaaatgtgtttgtaacaagatttaataagccattatttaaaacttcccttttgtgnggnnnaaatgtagaaganaaacctgacctaatttaattaatatnagagaaaatgccaaaatagnagatgagcccaaaggtttaataagtggtaaatgattaggggaaaataatcatggggaaagggatcttttttccttgaccctctgaaaacagaacgatgcagctggttacaaaatcctaccgttatcagctcttctgcacattgcagtgatgctttggtatgcggggagaaacactcttagggtgccggtccttggcatgactcttgccattctaattggaattagtgccaccctcagcttggattttgaacaagccttattctttcaggaagacaactaatggatgatagcaagttcatccacttactgggcttgtgccatgagcaaaattcaaagtcctgtatatctttcattgtagatttttaaatactccttttcctaaaaaactcaagggtttaaaaattgctattttatattttaaatgatattgagcagctacctacaatttctatgtacattttgttccccccccaccaccacccccaaattacgttccttttgacattttcctcatctgctgtttgtgacaagtcatcagccagatttcctgactgacacataggtatgatcagtgcaggagagacctgcgcaccacaggctgcaaactggaggttctgttctcatggcaggttgggcagtaacttttgagagaggccaaaaaaaggaggatgacatgctgtctcctctcttcagatagacattaggctcttattcagaaaggatttttctttaaaaatgtacttactttactgaactacttacaggcacatttcttcataaggccacacctaatccaaacaagacagtctcccaacactgaagttccaaaataatccttaccactttgtaaaccatttatagctttgaaagtgttaagtgattccttcgttattatttatgcatgttcatgaacttctgctggacattggaataggagttaacacattcacatttactgtctattttcttgggtgccttatgagatggccncnctgacagtactccaatagtctttctngctacgcaggnnnataatcagcacaactactgctttctagaatactactactcaaggctcggcgttgggtttaaattacactgcaccaggtaacaatgaactccatttcaggaactgaatatttgactgttaacctttttcccatacgtccagtgtggcatggagcatatggacttgacagacatctctcacccagacgcccacgtgtgaacacacccacatccacatctctgggtggaaaccagcctagagaggggacgacgctaatggtgttgctttagaaccgtcttttcttacccttttagactcgtgttttgtgtgagacaccattgcaagaaaattttatccctccagaagtattttattactaaagaacaaaagcaaaaaaagcttaaattgcactggttaaagtacagtttccaacagctgtccttcctcagtactctaatggccactccaccgcgagtggaagtcactgttgtgtgtacacaggtggtcccaatcaaaacttcatcttgtgagcccaattatgtccattttgttatagactaaatcaggggtttgttctacaagaacaatacatgttttaccctttcctttaactagaaggataactagtaatgcatcaacataatttctgtattaaccatcatgcgcacaagaaatacataggaaataaggaagaagaaaactcctggcatcggatcttaagctagatgattagaatgtgaaaaagattttacaaatgtaaaacttctatttctctgtagaaactttcttcactttgctgtgcaagaagacactgctttgctatattcaaaatggcttttcttacaagagatttatgtatttggtaaatgtttgtagtcaacagttcacacaagaagctgtacacggtttgatcatgtaaaaccgtttggcggcacaagctggactttgttgccatccttgagatgaaccttttaagaaaaataagttaatctcaatttttccctgaatgtgttgtttttcttcattatacaataaatataatagtgaactttttatcaaatggtgaagacaatgctaaaggttgttgcaaactgtttgtctcccgcactcactccagtaaagacggactggctcttcctgtgcgtcgagactctgtcacgtttgcctggggacacaaggcgctggctttgccaccaggcagccccttcccctaaagccctctcctttttcattcctttcacgaagaccttcttcacccgcaggcttctttctctgggttgagacagggccaaggaaaccgtcccaacgccccactgggc

SEQ ID NO: 1939 - DNA, 481 bp, Homo sapiens
actttgtaggacaaaacatagctggttaaccttgaagtgactgttgtaccatggttgtgcacatgcttcagaatcctatggaagagaatattcctacttgcagtacatcaaaggaatggatggtggaccctactattcatgttttgagacataaatgttcactttaaagcaattgcataatagataaaaacctgaactttcattggatttttgttaattttcctcattttgaattatgtgcactaccatagctacatcagtttgatacagtattgaaaaattatcagttatattttgctgtttatgatctatttgtagattaggattaaaatggatttaatccatttttaaggctgtgtgaatttttctaaacaagaaccatttgcaatatggatttcttagagattaaaccaattataacttattagcagtcgcgagcacatgttcatatagtcaatgtaaaaatacactaatgagtatt

SEQ ID NO: 1940 - DNA, 678 bp, Homo sapiens
  misc_feature: n=a,t,g or c
cacaaaaaaaaaatcactaaaaattcccacaaatcttgtttctggcactttagaaaaactgcaaaaaaatacgtaataaagaatacatatatatatatctacacacaaattatatatctatctatctatacagcggaaccacaagagagactgaggaaggcctggaggcaggggcagaggtgacgacagtgcccctatatccttaacccatactcctctgaggcaaacaggcatgggaaaatggaagggttgaggatggaccggagaattggaacttcagaataggtcaaaattccaaaaccatggacatttttttttgggagaattgagattgtagacattttttttttcttaaatatgatcaaggaaaatagcttccagaatgtggtggttctgggcaacaaatgagattgtggcgacgtggagattaaaatatatgtatttgagctggggaatttgaatattgtgagtttcagatgttggaaatttgggattttgcagttttgtcttttgaaaatgatcaagtcttgtcagttcgtgccctctttccccatgttccctgggaagacgggtggtggcagagtgagaaggccactggtctgtgccgcacacgcaaaatttagaatctccagctagctctatcgtgtgaggnccagattagggaantgccatattacc

SEQ ID NO: 1941 - DNA, 379 bp, Homo sapiens; identical to SEQ ID NO: 361

SEQ ID NO: 1942 - DNA, 276 bp, Homo sapiens
ttttttttgaaggcttttcttttattacatctaaagagctctacataaacaggtaacattcaataggtaaacaatttttttccaatgcatgtaataaatattttcacttggtacttttatacaaactgacattgtctactatacatttttaaaagccattttactggtttggcatgcggtatggaaattctaagagagaaagttttaaggcaatgaatcacagatttaagttcatggaatttatggtaactttatctgtttatgtacattttcccc

SEQ ID NO: 1943 - DNA, 324 bp, Homo sapiens
tcagagtattgcaacactttattaagagtattggctttgaatcagtagctgaagtaacaattgcatgaagccagattaggtgcactgcataatacccatactcgatttattgacattacttagcaatttactggacaaaagtcaaacttttttgttttttattaagcacattccacagtacaaagctgtcatgaataatatctgtacaatttaacagtttcaaatagctgttcagacacaaatttatttcaaacagataattggcaaacataattaatttacaagttagaattagactatcccagtgctttaaaacattaatat

SEQ ID NO: 1944 - DNA, 308 bp, Homo sapiens
tcccaattaggacttaaggaatgtgctgggacaaagttggcttcagtgatcaggttgtttcaagtcttagaattcaaacttcaattctaaaaaaattttatcaacaaaacactgtgaccaaaaaatcactttaaatcttaaatattgaaacgcaatagcatataaagatggtataacctaagatgcttttatttcattatattttcaatatctttacgcattataacaacagaaatgtaacctactcacattgccatttgttccattatgcaatttgaagaaacatgttttccttttatttttatgaa

SEQ ID NO: 1945 - DNA, 491 bp, Homo sapiens
  misc_feature: n=a,t,g or c
tttggagtccaagtctcttatctttattttaacagactggcagcatcaggtcgcagcagcagtacagggttcctggctgggcagcacaggcctggggcgacagtccatgtcttgtctgcccagggcagtgtcaacttaggcctctactccatggctgtgaaaggacagcagcctcaaggcagtctagctcctgggcacaggcagccaaaccccctcccatatccagctaaaccagctccaggaaaggagaaggtcctgtttccccggcatccttggggcccagggactggttctttcaccggatgatcttgcctggttgaaccacagcagcatttgggctttttcatcctttcctacatcaagaactttcccaaatgtgggccctgggcgtaaggcaaaacagtggccttggccaaggctctgggcctctgggagggtcccatctggcatcaggtggcgnacaaacagggtgtcagcacggagagagctgg

SEQ ID NO: 1946 - DNA, 328 bp, Homo sapiens
tttttttttttgtttgtaaaaatgaatttattaaaatgctcataattataaaagaatattaaaatgcacagaaattaacattaataattataaaagaatattaaaatgcacagaaattaacattaattacaaactttacatcttatgccacaatgtgtgaaaagcatcatgaatagttctacttcagttaagctgctcatacatttttaccctctcaaacataatatgaacataaaatggtacaagaagtgtttcaacaagagtacattctgacccccattgtgaattaatgttttatgaaattcaaggcacacatgcaataaaaaag

SEQ ID NO: 1947 - DNA, 1769 bp, Homo sapiens
cctcactgactataaaagaatagagaaggaagggcttcagtgaccggctgcctggctgacttacagcagtcagactctgacaggatcatggctatgatggaggtccaggggggacccagcctgggacagacctgcgtgctgatcgtgatcttcacagtgctcctgcagtctctctgtgtggctgtaacttacgtgtactttaccaacgagctgaagcagatgcaggacaagtactccaaaagtggcattgcttgtttcttaaaagaagatgacagttattgggaccccaatgacgaagagagtatgaacagcccctgctggcaagtcaagtggcaactccgtcagctcgttagaaagatgattttgagaacctctgaggaaaccatttctacagttcaagaaaagcaacaaaatatttctcccctagtgagagaaagaggtcctcagagagtagcagctcacataactgggaccagaggaagaagcaacacattgtcttctccaaactccaagaatgaaaaggctctgggccgcaaaataaactcctgggaatcatcaaggagtgggcattcattcctgagcaacttgcacttgaggaatggtgaactggtcatccatgaaaaagggttttactacatctattcccaaacatactttcgatttcaggaggaaataaaagaaaacacaaagaacgacaaacaaatggtccaatatatttacaaatacacaagttatcctgaccctatattgttgatgaaaagtgctagaaatagttgttggtctaaagatgcagaatatggactctattccatctatcaagggggaatatttgagcttaaggaaaatgacagaatttttgtttctgtaacaaatgagcacttgatagacatggaccatgaagccagttttttcggggcctttttagttggctaactgacctggaaagaaaaagcaataacctcaaagtgactattcagttttcaggatgatacactatgaagatgtttcaaaaaatctgaccaaaacaaacaaacagaaaacagaaaacaaaaaaacctctatgcaatctgagtagagcagccacaaccaaaaaattctacaacacacactgttctgaaagtgactcacttatcccaagaaaatgaaattgctgaaagatctttcaggactctacctcatatcagtttgctagcagaaatctagaagactgtcagcttccaaacattaatgcaatggttaacatcttctgtctttataatctactccttgtaaagactgtagaagaaagcgcaacaatccatctctcaagtagtgtatcacagtagtagcctccaggtttccttaagggacaacatccttaagtcaaaagagagaagaggcaccactaaaagatcgcagtttgcctggtgcagtggctcacacctgtaatcccaacattttgggaacccaaggtgggtagatcacgagatcaagagatcaagaccatagtgaccaacatagtgaaaccccatctctactgaaagtgcaaaaattagctgggtgtgttggcacatgcctgtagtcccagctacttgagaggctgaggcaggagaatcgtttgaacccgggaggcagaggttgcagtgtggtgagatcatgccactacactccagcctggcgacagagcgagacttggtttcaaaaaaaaaaaaaaaaaaaaacttcagtaagtacgtgttatttttttcaataaaattctattacagtatgtcaaaaaaaaaaaaaaaaaa

SEQ ID NO: 1948 - DNA, 9517 bp, Homo sapiens; identical to SEQ ID NO: 530

SEQ ID NO: 1949 - DNA, 4587 bp, Homo sapiens
gcaggcaggcggcgggcgctcagacggcttctcctcctcctcttgctcctccagctcctgctccttcgccgggaggccgcccgccgagtcctgcgccagcgccgaggcagcctcgctgcgccccatcccgtcccgccgggcactcggagggcagcgcgccggaggccaaggttgccccgcacggcccggcgggcgagcgagctcgggctgcagcagccccgccggcggcgcgcacggcaactttggagaggcgagcagcagccccggcagcggcggcagcagcggcaatgaccccttggctcgggctcatcgtgctcctgggcagctggagcctgggggactggggcgccgaggcgtgcacatgctcgcccagccacccccaggacgccttctgcaactccgacatcgtgatccgggccaaggtggtggggaagaagctggtaaaggaggggcccttcggcacgctggtctacaccatcaagcagatgaagatgtaccgaggcttcaccaagatgccccatgtgcagtacatccacacggaagcttccgagagtctctgtggccttaagctggaggtcaacaagtaccagtacctgctgacaggtcgcgtctatgatggcaagatgtacacggggctgtgcaacttcgtggagaggtgggaccagctcaccctctcccagcgcaaggggctgaactatcggtatcacctgggttgtaactgcaagatcaagtcctgctactacctgccttgctttgtgacttccaagaacgagtgtctctggaccgacatgctctccaatttcggttaccctggctaccagtccaaacactacgcctgcatccggcagaagggcggctactgcagctggtaccgaggatgggcccccccggataaaagcatcatcaatgccacagacccctgagcgccagaccctgccccacctcacttccctcccttcccgctgagcttcccttggacactaactcttcccagatgatgacaatgaaattagtgcctgttttcttgcaaatttagcacttggaacatttaaagaaaggtctatgctgtcatatggggtttattgggaactatcctcctggccccaccctgccccttctttttggttttgacatcattcatttccacctgggaatttctggtgccatgccagaaagaatgaggaacctgtattcctcttcttcgtgataatataatctctatttttttaggaaaacaaaaatgaaaaactactccatttgaggattgtaattcccacccctcttgcttcttccccacctcaccatctcccagaccctcttccctttgcccttctcctccaatacataaaggacacagacaaggaacttgctgaaaggccaaccatttcaggatcagtcaaaggcagcaagcagatagactcaaggtgtgtgaaagatgttatacaccaggagctgccactgcatgtcccaaccagactgtgtctgtctgtgtctgcatgtaagagtgagggagggaaggaaggaactacaagagagtcggagatgatgcagcacacacacaattccccagcccagtgatgcttgtgttgaccagatgttcctgagtctggagcaagcacccaggccagaataacagagctttcttagttggtgaagacttaaacatctgcctgaggtcaggaggcaatttgcctgccttgtacaaaagctcaggtgaaagactgagatgaatgtctttcctctccctgcctcccaccagacttcctcctggaaaacgctttggtagatttggccaggagctttcttttatgtaaattggataaatacacacaccatacactatccacagatatagccaagtagatttgggtagaggatactatttccagaatagtgtttagctcacctagggggatatgtttgtatacacatttgcatatacccacatggggacataagctaatttttttacaggacacagaattctgttcaatgctgttaaatatgccaatagtttaatctcttctattttgttgtcgttgcttgtttgaagaaaatcatgacattccaagttgacattttttttttcattttaattaaaatttgaaattctgaacaccgtcagcaccctctcttccctatcatgggtcatctgacccctgtccgtctccttgtccctgcttcatgtttgggggcctttctttaactgccttcctggcttagctcagatggcagatgagagtgtagtcaagggcctgggcacaggagggagagctgcagagtgtcctgcctgccttggctggagggacacctctcctgggtgtggagacagcttggttccctttccctagctccctggtgggtgaatgccacctcctgagatcctcacctcttggaattaaaattgttggtcactggggaaagcctgagtttgcaaccagttgtagggtttctgttgtgttttttttttttttgaaataaaactataatataaattctcctattaaataaaattattttaagttttagtgtcaaaagtgagatgctgagagtaggtgataatgtatattttacagagtgggggttggcaggatggtgacattgaacatgattgctctctgtctcttttttcagcttatgggtatttatcttctattagtatttgtatcttcagttcattccactttaggaaacagagctgccaattgaaacagaagaagaaaaaaaaaaaagcagcagacaacacactgtagagtcttgcacacacacaagtgcccaggcaaggtgcttggcagaaccgcagagtgggaagagagtaccggcatcgggtttccttgggatcaatttcattaccgtgtacctttcccattgtggtcacgccatttggcagggggagaatgggaggcttggccttctttgtgaggcagtgtgagcagaagaagctgatgccagcatgtcactggttttgaagggatgagcccagacttgatgttttgggattgtccttattttaacctcaaggtctcgcatggtggggcccctgaccaacctacacaagttccctcccacaagtggacatcagtgtcttctctgtgaggcatctggccattcgcactccctggtgtggtcagcctctctcacacaaggaggaacttgggtgaaggctgagtgtgaggcacctgaagtttccctgcggagtcgataaattagcagaaccacatccccatctgttaggccttggtgaggaggccctgggcaaagaagggtctttcgcaaagcgatgtcagagggcggttttgagctttctataagctatagctttgtttatttcacccgttcacttactgtataatttaaaatcatttatgtagctgagacacttctgtatttcaatcatatcatgaacattttattttgctaaatcttgtgtcatgtgtaggctgtaatatgtgtacattgtgtttaagagaaaaatgaaacccacatgccgccattttcctgaatcaaattctgcagtggaatggagaggaaaatacttctaggcaagcagctagactggtgaattgggggaaatagaaggaactagtaactgagactcctccagcctcttccctattggaatcccaatggctcctggagtaggaaaaaagtttaaactacattcatgttcttgttctgtgtcactcggccctgggtagtctaccatttacttcaccccaagtcctgctgcccatccagttgggaagcccatgattttcctaagaatccagggccataggagatacaattccaagttctcgcttcctcctttgggcatctcttctgcctcccaatcaaggaagctccacgctcaggctctcagctctcgggccagtgctctgctctgtccagggtaggtaatactgggagactcctgtcttttaccctcccctcgttccagacctgcctcatggtggcaacatggttcttgaacaattaaagaaacaaatgactttttggaatagccctgtctagggcaaactgtggcccccaggagacactacccttccatgccccagacctctgtcttgcatgtgacaattgacaatctggactaccccaagatggcacccaagtgtttggcttctggctacctaaggttaacatgtcactagagtatttttatgagagacaaacattataaaaatctgatggcaaaagcaaaacaaaatggaaagtaggggaggtggatgtgacaacaacttccaaattggctctttggaggcgagaggaaggggagaacttggagaatagtttttgctttgggggtagaggcttcttagattctcccagcatccgcctttccctttagccagtctgctgtcctgaaacccagaagtgatggagagaaaccaacaagagatctcgaaccctgtctagaaggaatgtatttgttgctaaatttcgtagcactgtttacagttttcctccatgttatttatgaattttatattccgtgaatgtatattgtcttgtaatgttgcataatgttcactttttatagtgtgtcctttattctaaacagtaaagtggttttatttctatcac

SEQ ID NO: 1950 - DNA, 309 bp, Homo sapiens
tttttttttttttttttttttttttttcattattggtagctttattaaatttgtttaccttctaaaaaaaacgattacaaaaaagaatacttcatttaagtgtaatactggctttatggacgtaccgtgatcagaaagtgaaattaaagctcatggatatgcgtgagaagagaatgggcgcagaggcacgagtccagtatcccacggagagaaggaagtgtagagagatgcgtggacccatctcaggggtcacgcattcctgggccaaggagttgcttctaagagcttaaaataaatgcactggctggc

SEQ ID NO: 1951 - DNA, 430 bp, Homo sapiens
tttttttttttttttgaagtctctcaacatttcatttttaatttttctaatagtacattctttaaaagaagttaacgacttcaattccaaatataaggattaaataatgcaatgaaaagctgtcattttcagtgaagctattgcctaattaccctggaaaaaagtattcttatgactgaactgatgcaaaaatcccttagaaaagcttcatttgttgcctgtaaagagtcttcttaaggtcacttttacttctagactgcccccttgtttccagtgaaagagttttgcttggtaatggcttgtggttccacagtgttttgtgtatgaaaagcgtagactaagagatactactgaagtcgctcaaattgtagattctgccatgaaaggaagtcccaacactgtaacatttccccttaatcttcagcaagac

SEQ ID NO: 1952 - DNA, 371 bp, Homo sapiens
acaatgcatggattacttttattcatatgaaagtaatataaaatgttacctaacttaaataatataaaatatcggtttaaccaaattaacaatcacaaaactgcagacatttttctattaaagttttccagttcactgagcaatatttactgaaaaatatgattatgaacttaaatatgtcctctttaaaatttgctgtttatgctagactgtacaatggtgctccctttatgatttttaaaaattttacttacataactatgtaattccaaaatagaaaagtgagtgagccatcactaaaatttactggaaactaatattctttcatggaaacaactgataaacattttaaagttctatatttatttaaa

SEQ ID NO: 1953 - DNA, 82 bp, Homo sapiens
tatttttgacctgtacaataggcactttattagtggttggaatgcagttacacgcaggggtgtgcagacgcaatgggggcag

SEQ ID NO: 1954 - DNA, 281 bp, Homo sapiens
  misc_feature: n=a,t,g or c
agtgtaataattttattaataaaacgaacccatagggttcaaacaagcatacaaagtaattcccttccctgtgggttaaattgttacatttttaataataaaactaaganagctttcatagttaacttaccaaaaacataacgcttgcctattgtttcttactgtgcaaaacaaaaccaaagttttgcccacaganggnttttgtgcaccaaancatgcacatttncaatttcaaaatttctgcatcaaaatgnaaattccaaggccacgtttttgttttt

SEQ ID NO: 1955 - DNA, 2638 bp, Homo sapiens
gaggaaaggggaaatgcggcccgctccccactcagtgccactctgtgccactccgtgccaggccctgagggcacccggttgctgcttccttccgtctttccccaaggactatcagagatgccagcgtgacccctgacacgtgtgtgcagcagcctgcagctgccccaagccatggctgaacactgactcccagctgtgggcttcaccattacagactccccagggcttcaaagacttctcagcttcgagcatggcttttggctgtcagggcagctgtacaatagtggatgtttgagacggaggcagatgagaagagggagatggccttggaggaagggaaggggcctggtgccgaggattccccacccagcaaggagccctctcctggccaggagcttcctccaggacaagaccttccacccaacaaggactccccttctgggcaggaacccgctcccagccaagaaccactgtccagcaaagactcagctacctctgaaggatcccctccaggcccagatgctccgcccagcaaggatgtgccaccatgccaggaaccccctccagcccaagacctctcaccctgccaggacctacctgctggtcaagaacccctgcctcaccaggaccctctactcaccaaagacctccctgccatccaggaatcccccacccgggaccttccaccctgtcaagatctgcctcctagccaggtctccctgccagccaaggcccttactgaggacaccatgagctccggggacctactagcagctactggggacccacctgcggcccccaggccagccttcgtgatccctgaggtccggctggatagcacctacagccagaaggcaggggcagagcagggctgctcgggagatgaggaggatgcagaagaggccgaggaggtggaggagggggaggaaggggaggaggacgaggatgaggacaccagcgatgacaactacggagagcgcagtgaggccaagcgcagcagcatgatcgagacgggccagggggctgagggtggcctctcactgcgtgtgcagaactcgctgcggcgccggacgcacagcgagggcagcctgctgcaggagccccgagggccctgctttgcctccgacaccaccttgcactgctcagacggtgagggcgccgcctccacctggggcatgccttcgcccagcaccctcaagaaagagctgggccgcaatggtggctccatgcaccacctttccctcttcttcacaggacacaggaagatgagcggggctgacaccgttggggatgatgacgaagcctcccggaagagaaagagcaaaaacctagccaaggacatgaagaacaagctggggatcttcagacggcggaatgagtcccctggagcccctcccgcgggcaaggcagacaaaatgatgaagtcattcaagcccacctcagaggaagccctcaagtggggcgagtccttggagaagctgctggttcacaaatacgggttagcagtgttccaagccttccttcgcactgagttcagtgaggagaatctggagttctggttggcttgtgaggacttcaagaaggtcaagtcacagtccaagatggcatccaaggccaagaagatctttgctgaatacatcgcgatccaggcatgcaaggaggtcaacctggactcctacacgcgggagcacaccaaggacaacctgcagagcgtcacgcggggctgcttcgacctggcacagaagcgcatcttcgggctcatggaaaaggactcgtaccctcgctttctccgttctgacctctacctggaccttattaaccagaagaagatgagtcccccgctttaggggccactggagtcgagctcagcgttcacaccaggcgggctgggtcccctgcccacctgcctccctgccccctgtgacggagggggcaagcaagcccccagaggccgtgtctctggacagacggatagacatacggaagcgaggcctggaccaagagaggcccaggctactggaggagtagaaggatgggccccgtggggtccccactgccccggtacgagggggcccaagaccctggcaggtcaggggccctggccaagccagatctggagctgctgctccctgctgcggagaccgcggaggcttcgcgttgaccaagttccttaaagaactggctgatggggcaggaggtccaggcctgggctctcgggccctcctagagggccattggagcttgcagctcagacccccactttgagttttatttatttaaatagtagttggatgcttggcacgtcgtcctgtaataggaaacccttgcctcatcagttttcctgatttacaagtgcaatattttagccaatgccttgggagaagctgccatgcaaaggtggacaccattctccagcttcaggggatatgctcgtcccgggcaccggtggcaggcagctggccttctggactaaggcagcctggggggacactgcagtctggctacacacagagatctggcaccccctgggtggagtgtccctcgggggctttgggaaagcatggcaccctcagaccacacagtagccaagttctggagcaaataaaaggcctgtgttatttcttgttcttgaaaaaaa

SEQ ID NO: 1956 - DNA, 345 bp, Homo sapiens
tttttaaaaattaagactggggtgatttattaatcttgttaagaactctgatacaaagcacagtaaaaggccacaaaccagtaaataaacaacgtggcttttggctactttacaactgctgctacagcactatcagcaaaacactctatcactttgaacgaaggcatccaaatggcaaataaaagctttactcacttatctgattaaaatgtttaataaagctttaagtatttgctggtttaaatattaccaatctaaaaaatatatttaaaaaaaatttcagttaacacgagatttatagagaaagttactaggtcttgaaggcaaggcagttggttcctatgc

SEQ ID NO: 1957 - DNA, 214 bp, Homo sapiens
  misc_feature: n=a,t,g or c
gttcagtgatagtttattggtccttagcatgacatctcgattaccaaggtaaattcacatacacaactgcaggtaaaaacatgtaaaataatataaaantaaattgaaggctacttttatatatttnctgaattaagtagtgtaataaatactatgataagcaaaaagcttcaatcgcacaattcagtttcactgaagttacagtagtgtttgt

SEQ ID NO: 1958 - DNA, 386 bp, Homo sapiens
ttttttttgcaacatttaatacagtttttatttgtttaatttggtaaatgtagaatgtaatggtttcaaggcaaaccctggactacttcagtcacaacccaatagttaacatgattctgaagaacagtcttatctgcaatatctacccacttctaaacaaacacatctatagaaatccatgtacatatatattagttttcaacaagtcaggattttcaacaactctaaaatttcaattttatattctggaacacacttcaaaattatccacttgatgtcagggatataaccataggggaggataaaatttcatgccaatgatactcagggtttttttttttaaagggtaaatcccaatattttgatccattccatggctaccataa

SEQ ID NO: 1959 - DNA, 323 bp, Homo sapiens
  misc_feature: n=a,t,g or c
aaacagtaggctttgaaggacagcaggaaaaaaaaaaactgaaaactttgtattcacatttggctgcccattaattaaaacttcaatggacttaagcaatttgaattataaactctcatttaataaaacacccacacaatgacaagaatgagactttaatcagttttaagtggagtttataacactaagngataaagggttgttaacaaacacaataacaaatggncatctgattgggatgaggcattatcctgtacacatcatattggtatttttgtgtatcctcagtgcatagcatttacacacagagccactgctgcaca

SEQ ID NO: 1960 - DNA, 390 bp, Homo sapiens
  misc_feature: n=a,t,g or c
ttttttgtgcaaatattttttacttnatttgtctcctttcaggagcctcacagacatatccagggaaaaagatcgttaaataaatgccttcagccatcgcaatgcaaaaataaatatcaatcctccagacgcagtagcagccncgntggcnccaaagtcccaacggccacggctaacaattataaaagtgttcagcgagagtgttggcgtgagtgtgaatgggtgtgcgctggggggcacggtggagcggtgtgcaaaatcggagttgcaaaccatcggacaagggcatggagtggctacccgccgccgactcagcgcgggcnccttccccgcacacantcacagcagagttcgcactggggagngttaaaaaataaacatttacaggtc

SEQ ID NO: 1961 - DNA, 324 bp, Homo sapiens
tttaatgagactaacattattttaaagtgtttatttttttctataatacatttcattcaaatcataaaagtctgatacatttttttctcaagaacaacttacactcatttgagatgctttttctttcctttaatcttataggatggacaaagatacactttaatggacaaaaaacaccagagttcattacaaatacagcttcccaggccccacctccagcacttctgactgagcgtctgggaccagtcctaggatcgcaaaactgtaaaattcccccagtcaactccacggcaggcaggcctggaaccacccttagtggaacac

SEQ ID NO: 1962 - DNA, 311 bp, Homo sapiens
tttttttatcttttaaaaatacactttaatctaaccatggaatttcacaaacatttatatacaatcagagactaatttgaagtatgttttccattcatttcagccatgagaaaacacattgcagtaaaaattaaagatatccatccataaattacttttatttctcattaaatgagcacagagtcattagtatattaataacagatatgtttattattacatatccatcagtgcggctttcaataccacttgaaacatgcatatcatcctagagacgatcggttttccagtgcttcttatctgatacacat

SEQ ID NO: 1963 - DNA, 365 bp, Homo sapiens
gtattcagttatacattttattctctaataggtacaatactaaaataaacacaaattaaaaaaaagttttattaaaacaaaactgtacaaaaaagcagtatactacattttaattacagaacagtctactgtccaaaaggcactaatccagaataggagatacaatgatacaggactcatttgaactattttattcaaaacaatagagcgcttgtttctttgaccatttacatctagaaacaagggctttttgctacagccattacacattgttataaatatgagtcctacgggtgaaggtgcagtatcactctccctagaggaggttccattagtgggaccactgtggagctcagaggcggatg

SEQ ID NO: 1964 - DNA, 379 bp, Homo sapiens
ttttttaggaataacaaatgtttattcagaaatggataagtaatacataatcacccttcatctcttaatgccccttcctctccttctgcacaggagacacagatgggtaacatagaggcatgggaagtggaggaggacacaggactagcccaccaccttctcctcccggtctcccaagatgactgcttatagagtggaggaggcaaacaggtcccctcaatgtaccagatggtcacctatagcaccagctccagatggccacgtggctgcagctggactcaatgaaactctgtgacaaccagaagatacctgctttgggatgagagggaggataaagccatgcagggaggatatttaccatccctaccctaagcacagt

SEQ ID NO: 1965 - DNA, 285 bp, Homo sapiens
  misc_feature: n=a,t,g or c
aaagttctgattggctactgtaaaggcaatcttagaagatgcatgtaaatataatataaatcaactttcttatcaattagacattttccccactcacatctcttagtttttagggtattcagtcccagcaaccaaaaaaaaaaatgtaaatcatattttgtttctggctaatgttcaatcagttttncttttataagagcttttgatgtactgtttctacggttctttaggcacttacacataaaaacattcagagggttttccccttaacacacaacttttaat

SEQ ID NO: 1966 - DNA, 325 bp, Homo sapiens
cataccaccattttcatttattagcaataacagaggaaataccaatagcaccaattcaaaatgaatccacatgacgtgttttatccttacagctgtaataactagtaactaacatggattggaaagcacttcgcaaatgtaaaaagtgctgtacagatacattataattatcatcattaataaattagcccgattctcccagttcaaaaggcacgtaaggtcagatacatgggcttcagtggggcaaaatgatcacaacctacaatgtagcaatggttcacatgtgttggtaacaagttttaccccatgcaatcctgcagagctg

SEQ ID NO: 1967 - DNA, 204 bp, Homo sapiens
agtttaatagacmtttattycttcagttgaacaacctctacacamttaaamtgtatgccytaagctctkktccttttttgtgaagaamtttaggtctcaagaacttttatgaacttgctatgagtacttyctgggaatyaattaactgrgccttttgaaacccctagagaagataggagaaacttggttcagaacgagcattaa

SEQ ID NO: 1968 - DNA, 399 bp, Homo sapiens
aaataaaaagtaatcatttttatttgcattggcatttttgtcaattcagactgagaaatgatgagccttttttgttgttgtttttagtagcttacatggtgcttttagttctataaaactcccatctttgttgaatgacgagattgtaaaccagaaaccaaaaaccaaaaaacacccacacagctgtcttatacttctgtaaccatttctgaacttaaaactctcttgttcgttacacctcattcattgcatcttagttttagcttgtcaaagatcttttagtagctctaacatagcccactagctaagtcttgtaaatgtgtataagctggacatttggtaatattatttttaaaaaaggaaaaggaggaataggtatacttatttaatacttattgt

SEQ ID NO: 1969 - DNA, 393 bp, Homo sapiens
  misc_feature: n=a,t,g or c
caaaaagcatttttgtttaatgctaagatcacttcagtttccaaggtcatataaagaaacatccaatttagagaaaaaattctgtaataagttcaaataccaaagcgtaaagatgatgtaacacagtgcctatgctgcatggttacacaaatgaaacgagaaaggtagtgattgcttctaaattctcactgaaaatccaatttaaaggtttattgcagtctaggtatttttaattttncccttggtgattatcaagatggttgatgctaataagtactattaaaaaactaaaatgctgtcgaatatggaacttcttttagttaagaattattaatatagaaaatgtgagttggtggactggtacttcttgtgcnctgatttttatttattnat

SEQ ID NO: 1970 - DNA, 5900 bp, Homo sapiens
gggatggcaagatcttttagcatttaggggatgcctttgttagtaaccgttcacaatgggcagctcccggctgagggtctttgaccctcatttggagaggaaagattccgccgcggcgctctcagaccgagagctgcccttgcctaccttcgatgtgccttatttcaaatacatcgacgaggaggatgaggacgatgaatggagcagccgttcgcagtcttccaccgaggatgactcagtggactctctgctctctgacagatatgtggtggtgtccgggaccccggagaagattttggagcaccttttgaatgacttgcacctggaagaagtccaggacaaagaaacagagaccctcctggatgacttccttctcacgtacactgtcttcatgacaactgatgacttgtgccaggctctgttaaggcactattctgctaagaagtatcaaggcaaagaggaaaactcagatgttccgcgtaggaaacgtaaagtcttgcatcttgtttcccagtggattgctctgtacaaagactggttacctgaagatgaacattcaaaaatgtttttaaagaccatatataggaatgtactggatgatgtttatgaatatccaatacttgaaaaagaattgaaagaatttcaaaagatacttggaatgcaccgtcgtcacactgtagatgaatattcaccacaaaaaaagaataaagcccttttccaccaattcagtcttaaggagaactggctccagcatagaggaactgtgactgaaacggaggaaattttctgccacgtgtatataacagagcactcctatgtcagtgtgaaggcaaaagtttccagtatagcccaagagatcctaaaagtcgtggcagaaaagatccagtatgcagaagaggatctggctctggtggccatcacattctctggggaaaagcatgaacttcagccaaatgacttagtcatctccaaatccctcgaggcatctggtcgaatatatgtctaccggaaagacctggcggacactttgaacccatttgcagaaaatgaggaatcacagcaaaggtcgatgaggattttgggaatgaacacttgggatcttgctctggaattaatgaattttgattggagtctattcaattcaattcacgagcaagagctgatctacttcacgttcagcagacagggaagtggggaacacactgcaaatctcagccttctgctccagagatgcaatgaggtccagctttgggtggccacggagattctgctctgcagccagctgggcaagcgagtgcagctggtgaaaaaattcatcaaaattgcggctcactgcaaagcccagagaaacctgaattctttctttgccattgtgatgggtctcaacactgcttctgtcagtcgactgtcgcagacctgggagaaaatccctgggaagtttaagaaacttttctctgaacttgaaagtttaacagatccttccctaaatcacaaagcctacagagatgcattcaaaaagatgaagccaccaaaaatccctttcatgcccttattgcttaaagatgtaacatttattcatgaaggaaataaaacttttttggataatcttgtcaattttgaaaagctgcatatgatcgcagacactgtccgaaccctgagacactgcaggactaaccagtttggtgacctgtctccaaaagagcatcaagagttaaagtcctatgttaatcacctgtatgtcattgacagccagcaggctctgtttgagctctcacacaggatcgagcctcgggtgtgagccccactgcctcacctcccctgtatctgcagcactttgagctacgggaatgtctatgccaagcacgttgctttcctgtgagaaaagaagttgctgagttttatcagtataacccaagacattcacaggaaagccagccaaagcgtgttcaggaagtgatgtcagccaccagagagggggagaggtttctccatgctactctcgggacaagaaggcagaaggagagtcagaagcattcttgagatggagaaggctggtttcttatgatcacattgttgatccagtccagttttcaatatgagatgtgccagcatcaagacaagacaacgtcttgacatgcaatgaccaaatatttcattaagagcgtgcatgaaacaggaaggagtttttactttgcctagttttagattactgtccataagctgtcaaagaagtcattcttttgaacacctgatgacagagacagcatctctagatctccagggaggagaggtttctgttgatacaacctgtgacatcaccaaaagccacttgtgtctagggagttagtgaggactgcagctagcatccatgctctgatgggcagatgaacaatgtcaaggtgtgcatcactttgcaccacaatcaactattgacacatgcttgcaggtgaaattagtttctgtacaactgatttgcagctataggcaaggtagatgaagttgctttgccagtaaggaaaaatagtaatctttaagaaattgactcattgtttaatttctggggattttctttatacttctaagcaggctcttatcttttattggacataatatgattttgaaaaagcacagtgcctgacacattgcaaacactcaccaactgcttgctgaggtgacagagtcacaaaagtctgcattcttgtgcctgatgatgcattttgcgtacctcatacaggctccttgcccacactatggaatgacagcagccagtgcagggaggttaagtgacatttaatgagtgaagcacttagcactctctaggtaataagatagtggtaattactagtgttttggcaaatgaaaaatgccctgaaatagccaaatgtctgattaatgttggcaacttagaagtcctataatccaactaccagccaaagcagggagcctttctataatttgcctttttttttttttttttcaaaatctgagtcttctaaaatcttattattcccatttttaccaattgaggctcctgtagcaaataagacctcttgatattttcaaggactggttagaggatttctttcaaccttcacatgaacaaaacagcctatgggtcaaaataatgaaatccacccctgcctgctagatacttgtcaccttgctaaaatgcaagggcctggtccattcattttccaaatgcaggagtcttggtgcacttctcactcttcctgcctgttcatctctttcatgcccacacagacctgtttcctttttgtctcatcaacgcctcattcatcctcattactgaggcgtgtccaatgctttttgacatctttatagcagtgctgtttcctgggctcaggaaccacactgagcttgagatactgctggaaggaaccatgtggagagaaggtttgggagaactttgagagagacttagtttggcccagcatgtaaaacttcagtcctgaacatttatagggttttatagaagggcatcctccagggctggtccattcagagaaatgctgcatgctgccgtcatggaatgtggcccacaggacaccagagccgtgagaaccggagagcagacttccctcacggctgggctgagcaaaccctccaaagccctcctcacgcagttactaacaatagcatgggcttacagcacaagcacgtgttctcacctttttcctatgccctggactaaggtttggccagtgtaatcatataaggccatcctgacattgtttctgtgtttcaaaatttggatttttatttacattagaactacattgctcctagtagaacattacctttaggggactaattttccatggagaactatttcagcatattgcatgctgctcagaccccaagtcagatatgcccaccaagccagatgaagctacacaaatgtggtatttaaatgcattttgtacagtgacttcagagtatctcacatgacatgggtgtaaactggctggggagaaaatgatgcttgttcacctcttcctccagccgtggttaggtggtcctaggggtagcagagggaagggaggattttgtgcagtcaagatttgcttttccatccttgtcttctgaatgtctaaaatctctgcatctttctgaagtttaacaactgtctccagaggtttgccaggcagcagctctcagaagtttccaaagctttgcagaatcttagatctggaattaaagaattcaagcccgaattgtgagaaccagatattactcaacagaaagctctttctaaggaatctgagctgttcactggtggacagtggtggggcttgagtgctccttgttaataggatgggccatgcaccctctctggatattcaccaaggcctcttcagaatagggtttgttctggctagaagcgtggtctagaagatggctaagctctttgccagctctcatttggagttttattattgcataaaatcttcgctcactctgcaaatcttacgtaatctggcaccttcggcaccaggtggtgcaggggcacttctaagtgggctctttttgttacagcacaactctcagacagtcctgtgggtctttggattcgtcagcattccagcaaactagccctgcttagaagttagcacaagacggcagaatgcaggaccccgtaggcaaaatcacaaccttgctattaaaaaaaatttttttttacatacacatttgcaggtgttccctagagtgtggtgttttgaatttgctctttgtcatctgtataattgccaaatgattatagtgatacacatgacctgcattcacttttttctagtttccttaattatgtttagaataaattcgtttccctagaccgagaaccacaaacaggtagtgtggagcatacaccgaatttagaagcatgtggataaggtcagtgctcacactgcctagtccacagggagaggatgctgcatgaatatatacttgcctctgagtggaggagaaatcgtggcatgaaagagagagtaccagtgatgacttcttatccctggagctgggctttcactgctacccatatcccagccctgcgagtctgttctagccagcacagacaccgcagatccggaactgaatgttcctaaatggcgcagccaatccaggcttttcagaaactgggcaaaaacattaaaatggggacgatcgggtcttccgcagtggtccaacacaggatttcttttaaatgtttcaaaaacatgtccttaaaatttcagcctgcttcttagcgagtgggccagttttgcttaaaactggtgggggggcgggggggaagtttttaaaaattgccaaaaagttagatgcaaatgtattactgtataaagcaaagctgtatatactaaacattttttagcagagtaatatttatttgcatagtctatttattgtattcgtattacactgttattaaatactgggatgaaatcagtgacctgaagcaagaaatcttgccttttaatgtatcattaattagggctgctgtgatattgtcagcttgcattaacaattagaagatagagaacccgccatcagggtgtctacctaacttctcagggactacacttggtagttttccaccatttaaagaactggtaaatatgaaacatttgttgagttaccagaattgccattaacagtgttttctttcccatattccatgctttctgcctctgtgtatatatataatatatatgtatatgactgtgctgtgtatttatcgaagctagtaagcaataatttatatgtaaaaatggccaagcaatataaggttaaaacttatataagtaacccttaccttatcttgtattttcaatttttttttaaaactgcttttccaaatatgagactatgttaaagacact

SEQ ID NO: 1971 - DNA, 270 bp, Homo sapiens
gccatgtaagtcccatcaggacgtagtcatgcctcctgcatttcgctacccgagtttagtaacagtgcagattccacgttcttgttccgatactctgagaagtgcctgatgttgatgtacttacagacacaagaacaatctttgctataattgtataaagccataaatgtacataaattatgtttaaatggcttggtgtctttcttttctaattatgcagaataagctctttattaggaattttttgtgaagctattaaatacttgagtt

SEQ ID NO: 1972 - DNA, 1071 bp, Homo sapiens; identical to SEQ ID NO: 824

SEQ ID NO: 1973 - DNA, 381 bp, Homo sapiens
  misc_feature: n=a,t,g or c
gtagttttagtgaaaacaaatttaatatcatcttgtttgaacaaagctttcagaataagtgagcaattaaattcttaaagtagggacagaacaccaacaggctctagactccggaagagctgtaanccgacaaatgggcattgttttgcttaacagttttagcttcaatgtaaatatatattattacttagaatattagcatctgaactatataatgactattttatcattttacttgaattaaaaccagaatttctggaacttccaaatagtctttaaagtttttcaatataaacataaactaacccctattcctctctacatatcaaatgtgaaataactgtcacaatatatcagcattttcacagaaagatgtttaag

SEQ ID NO: 1974 - DNA, 230 bp, Homo sapiens
gcagttatttcaattcaggttttattaaagttgtttctgaatattttttctcagtgatccttgttctgatgaatattacatttcatccttagttttgctcatttgattttgctttagtgtttaaagaacttttatttatcagatcctttgccatgaatgagagcaccaaataacatatcaatacccaactgcctgattcctttacagcagtaagaaaagtcagtaaaaca

SEQ ID NO: 1975 - DNA, 415 bp, Homo sapiens
  misc_feature: n=a,t,g or c
agtatatttcatattattactaatagttggcctatatatctgtatgtctgcatatttttcctacacttgggattttagaaatgtatggcactgtttacacagtatatgcttaagttcttcccataactcaacgaccaatgataacctttttctgattggagtgttccatactttggaagacataatttgtataatcgcacggttactgacggaggagaatctatgtgattcagtccatgtgcacaatgaaaatcagcatatcaccctggggaacattttagttcccaagtctttgggnaatgacggatggtaaaaaacactagctgtcaattttttttcagtaattggttttcagtgctttttttttttcaatctgatgaggagggtgatgcattaggaaggngtgtcccttgcc

SEQ ID NO: 1976 - DNA, 7888 bp, Homo sapiens
tccgggtatggatgtcaatcttttgtctacaatgtgaatacatttatccttcggggaccatcaagactttcaggaaaggccccgcctgtctctgcgcggccactttgctgggacaaaggtcaactgaagaagtgggcaggcccgaggcaggagagatgctgaggagtccatgtgcaggggagggaaagggagaggcagtcagggagaggaggaggaggtaccgccagaaggggatcctcccgctccgaaaaccagacaccgggtcttgccctgtggtccaggcaggagtgcagtggtgcaacctcagctcactgcagccttgacctccccgggctcaagcgatcctccggccacagcacttggctgttcagcggctggaggagcagggccccaggtcctccccaccctcacctgctgctcccaggtcgtggccgtcttgctcttccaggtccttctctagggatgcaatattcacattgctaagatgcaggtctaacgcagaacctgtcaacagagccccccatcatccacagcccacccagcgctgcagagctcaggaagcctagctgaggaggacgaccgtcccacctgggcttagagtgagaccaagggcagaaggcgtgggagttgctggggcagccagggaaggacacccccagcccgtcctcgcagccccccacaggcagtgggaggcttggctgttcctccggcaaaacgggcatgctcagtgggccgggccggcaggtttgcgtggccgctgagttgccggcgccggctgagccagcggacgccgcgttccttggcggccgccggttcccgggaagttacgtggcgaagccggcttccgaggagacgccgggaggccacgggtgctgctgacgggcgggcgaccgggcgaggccgacgtggccgggctgcgaaagctgcgggaggccgagtgggtgaccgcgctcggagggaggtgccggtcgggcgcgccccgtggagaagacccgggcggggcgggcgcttcccggacttttgtccgagttgaattccctccccctgggccgggcccttccgtccgcccccgcccgtgccccgctcgctctcgggagatgtttatttgggctgtggcgtgaggagcgggcgggccagcgccgcggagtttcgggtccgaggagcctcgcgcggcgctggagagagacaagatgtccgccagagctgcggccgccaagagcacagcaatggaggaaacagctatatgggaacaacatacagtgacgcttcacagggctcctggatttggatttggaattgcaatatctggtggacgagataatcctcattttcagagtggggaaacgtcaatagtgatttcagatgtgctgaaaggaggaccagctgaaggacagctacaggaaaatgaccgagttgcaatggttaacggagtttcaatggataatgttgaacatgcttttgctgttcagcaactaaggaaaagtgggaaaaatgcaaaaattacaattagaaggaagaagaaagttcaaataccagtaagtcgtcctgatcctgaaccagtatctgataatgaagaagatagttatgatgaggaaatacatgatccaagaagtggccggagtggtgtggttaacagaaggagtgagaagatttggccgagggatagaagtgcaagtagagagaggagcttgtccccgcggtcagacaggcggtcagtggcttccagccagcctgctaaacctactaaagtcacactggtgaaatcccggaaaaatgaagaatatggtcttcgattggcaagccatatatttgttaaggaaatttcacaagatagtttggcagcaagagatggcaatattcaagaaggtgatgttgtattgaagataaatggtactgtgacagaaaatatgtcattgacagatgcaaagacattgatagaaaggtctaaaggcaaattaaaaatggtagttcaaagagatgaacgggctacgctattgaatgtccctgatctttctgacagcatccactctgctaatgcctctgagagagacgacatttcagaaattcagtcactggcatcagatcattctggtcgatcacacgataggcctccccgccgcagccggtcacgatctcctgaccagcggtcagagccttctgatcattccaggcactcgccgcagcagccaagcaatggcagtctccggagtagagatgaagagagaatttctaaacctggggctgtctcaactcctgtaaagcatgctgatgatcacacacctaaaacagtggaagaagttacagttgaaagaaatgagaaacaaacaccttctcttccagaaccaaagcctgtgtatgcccaagttggcaaccagatgtggatttacctgtcagtccatctgatggtgtcctacctaattcaactcatgaagatgggatttcttcggcccagcatgaaattggtaaaattcagaaaaggagatagtgtgggtttgcggctggctggtggaaatgatgttggaatatttgtagctggcgttctagaagatagccctgcagccaaggaaggcttagaggaaggtgatcaaattctcagggtaaacaacgtagattttacaaatatcataagagaagaagccgtccttttcctgcttgacctccctaaaggagaagaagtgaccatattggctcagaagaagaaggatgtttatcgtcgcattgtagaatcagatgtaggagattctttctatattagaacccattttgaatatgaaaaggaatctccctatggacttagttttaacaaaggagaggtgttccgtgctgtggataccttgtacaatggaaaactgggctcttggcttgctattcgaattggtaaaaatcataaggaggtagaacgaggcatcatccctaataagaacagagctgagcagctagccagtgtacagtatacacttccaaaaacagcaggcggagaccgtgctgacttctggagattcagaggtcttcgcagctccaagagaaatcttcgaaaaagcagagaggatttgtccgctcagcctgttcaaacaaagtttccagcttatgaaagagtggttcttcgagaagctggatttctgaggcctgtaaccatttttggaccaatagctgatgttgccagagaaaagctggcaagagaagaaccagatatttatcaaattgcaaagagtgaaccacgagacgctggaactgaccaacgtagctctggctatattcgcctgcatacaataaagcaaatcatagatcaagacaaacatgctttattagatgtaacaccaaatgcagttgatcgtcttaactatgcccagtggtatccaattgttgtatttcttaaccctgattctaagcaaggagtaaaaacaatgagaatgaggttatgtccagaatctcggaaaagtgccaggaagttatacgagcgatctcataaacttgctaaaaataatcaccatctttttacaactacaattaacttaaattcaatgaatgatggttggtatggtgcgctgaaagaagcagttcaacaacagcaaaaccagctggtatgggtttccgagggaaaggcggatggtgctacaagtgatgaccttgatttgcatgatgatcgtctgtcctacctgtcagctccaggtagtgaatactcaatgtatagcacggacagtagacacacttctgactatgaagacacagacacagaaggcggggcctacactgatcaagaactagatgaaactcttaatgatgaggttgggactccaccggagtctgccattacacggtcctctgagcctgtaagagaggactcctctggaatgcatcatgaaaaccaaacatatcctccttactcaccacaagcgcagccacaaccaattcatagaatagactcccctggatttaagccagcctctcaacagaaagcagaagcttcatctccagtcccttacctttcgcctgaaacaaacccagcatcatcaacctctgctgttaatcataatgtaaatttaactaatgtcagactggaggagcccaccccagctccttccacctcttactcaccacaagctgattctttaagaacaccaagtactgaggcagctcacataatgctaagagatcaagaaccatcattgtcgtcgcatgtagatccaacaaaggtgtatagaaaggatccatatcccgaggaaatgatgaggcagaaccatgttttgaaacagccagccgttagtcacccagggcacaggccagacaaagagcctaatctgacctatgaaccccaactcccatacgtagagaaacaagccagcagagacctcgagcagcccacatacagatacgagtcctcaagctatacggaccagttttctcgaaactatgaacatcgtctgcgatacgaagatcgcgtccccatgtatgaagaacagtggtcatattatgatgacaaacagccctacccatctcggccaccttttgataatcagcactctcaagaccttgactccagacagcatcccgaagagtcctcagaacgagggtactttccacgttttgaagagccagcccctctgtcttacgacagcagaccacgttacgaacaggcacctagagcatccgccctgcggcacgaagagcagccagctcctgggtatgacacacatggtagactcagaccggaagcccagccccacccttcagcagggcccaagcctgcagagtccaagcagtattttgagcaatattcacgcagttacgagcaagtaccaccccaaggatttacctctagagcaggtcattttgagcctctccatggtgctgcagctgtccctccgctgataccttcatctcagcataagccagaagctctgccttcaaacaccaaaccactgcctccacccccaactcaaaccgaagaagaggaagatccagcaatgaagccacagtctgtactcaccagagttaagatgtttgaaaacaaaagatctgcatccttagagaccaagaaggatgtaaatgacactggcagttttaagcctccagaagtagcatctaaaccttcaggtgctcccatcattggtcccaaacccacttctcagaatcaattcagtgaacatgacaaaactctgtacaggatcccagaacctcaaaaacctcaactgaagccacctgaagatattgttcggtccaatcattatgaccctgaagaagatgaagaatattatcgaaaacagctgtcatactttgaccgaagaagttttgagaataagcctcctgcacacattgctgccagccatctctccgagcctgcaaagccagctcattctcagaatcaatcaaatttttctagttattcttcaaagggaaagcctcctgaagctgatggtgtggatagatcatttggcgagaaacgctatgaacccatccaggccactccccctcctcctccattgccctcgcagtatgcccagccatctcagcctgtcaccagcgcgtctctccacatacattctaagggagcacatggtgaaggtaattcagtgtcattggattttcagaattccttagtgtccaaaccagacccacctccatctcagaataagccagcaactttcagaccaccaaaccgagaagatactgctcaggcagctttctatccccagaaaagttttccagataaagccccagttaatggaactgaacagactcagaaaacagtcactccagcatacaatcgattcacaccaaaaccatatacaagttctgcccgaccatttgaacgcaagtttgaaagtcctaaattcaatcacaatcttctgccaagtgaaactgcacataaacctgacttgtcttcaaaaactcccacttctccaaaaactcttgtgaaatcgcacagtttggcacagcctcctgagtttgacagtggagttgaaactttctctatccatgcagagaagcctaaatatcaaataaataatatcagcacagtgcctaaagctattcctgtgagtccttcagctgtggaagaggatgaagatgaagatggtcatactgtggtggccacagcccgaggcatatttaacagcaatgggggcgtgctgagttccatagaaactggtgttagtataattatccctcaaggagccattcccgaaggagttgagcaggaaatctatttcaaggtctgccgggacaacagcatccttccacctttagataaagagaaaggtgaaacactgctgagtcctttggtgatgtgtggtccccatggcctcaagttcctgaagcctgtggagctgcgcttaccacactgtgatcctaaaacctggcaaaacaagtgtcttcccggagatccaaattatctcgttggagcaaactgtgtttctgtccttattgaccacttttaactcttgaaatataggaacttaaataatgtgaaactggattaaacttaatctaaatggaaccactctatcaagtattataccttttttagagttgatactacagtttgttagtatgaggcatttgtttgaactgataaagatgagtgagcatgcccctgaaccatggtcggaaaacatgctacacactgcatgtttgtgattgacgggactgttggtattggctagaggttcaaagatattttgctttgtgatttttgtaatttttttatcgtcactgcttaacttcacatattgatttccgttaaaataccagccagtaaatgggggtgcatttgaggtctgttctttccaaagtacactgtttcaaactttactatggccctggcctagcatacgtacacattttattttattatgcatgaagtaatatgcacacattttttaaatgcacctggaatatataaccagtgttgtggatttaacagaaatgtacagcaaggagatttacaactgggggagggtgaagtgaagacaatgacttactgtacatgaaaacacatttttcttagggaaggatacaaaagcatgtgagactggttccatggcctcttcagatctctaacttcaccatattaccacagacatactaaccagcagaaatgccttaccctcatgttcttaattcttagctcattctccttgtgttactaagtttttatggcttttgtgcattatctagatactgtatcatgacaaagactgagtacgttgtgcatttggtggtttcagaaatgtgttatcacccagaagaaaatagtggtgtgatttggggatatttttttcttttcttttcttttcttttttttttttttttgacaaggggcagtggtggttttctgttctttctggctatgcatttgaaaattttgatgttttaaggatgcttgtacataatgcgtgcataccacttttgttcttggtttgtaaattaacttttataaactttaccttttttatacataaacaagaccacgtttctaaaggctacctttgtattctctcctgtacctcttgagccttgaactttgacctctgcagcaataaagcagcgtttctatgacacatgcaaggtcattttttttaagaaaaaggatgcacagagttgttacatttttaagtgctgcatttaaaagatacagttactcagaattctctagtttgattaaattcttgcaaagtatccctactgtaatttgtgatacaatgctgtgccctaaagtgtatttttttactaatagacaatttattatgacacatcagcacgatttctgtttaaataatacaccactacattctgttaatcattaggtgtgactgaatttcttttgccgttattaaaaatctcaaatttctaaatctccaaaataaaactttttaaaataaaaaaaaat

SEQ ID NO: 1977 - DNA, 2216 bp, Homo sapiens
atttgatcctattaagaattgtccaaatgttggagcatttgattgaaaaatccttcttagccattttaaagatagctttccaatgattagacgaattgattctttctgtgactcatcagttcctttcctgtaaaattcatgtcttgctgttgatttgtgaataagaaccagagcttgtagaaaccactttaatcatatccaggagtttgcaagaaacaggtgcttaacactaattcacctcctgaacaagaaaaatgggctgtgaccggaactgtgggctcatcgctggggctgtcattggtgctgtcctggctgtgtttggaggtattctaatgccagttggagacctgcttatccagaagacaattaaaaagcaagttgtcctcgaagaaggtacaattgcttttaaaaattgggttaaaacaggcacagaagtttacagacagttttggatctttgatgtgcaaaatccacaggaagtgatgatgaacagcagcaacattcaagttaagcaaagaggtccttatacgtacagagttcgttttctagccaaggaaaatgtaacccaggacgctgaggacaacacagtctctttcctgcagcccaatggtgccatcttcgaaccttcactatcagttggaacagaggctgacaacttcacagttctcaatctggctgtggcagctgcatcccatatctatcaaaatcaatttgttcaaatgatcctcaattcacttattaacaagtcaaaatcttctatgttccaagtcagaactttgagagaactgttatggggctatagggatccatttttgagtttggttccgtaccctgttactaccacagttggtctgttttatccttacaacaatactgcagatggagtttataaagttttcaatggaaaagataacataagtaaagttgccataatcgacacatataaaggtaaaaggaatctgtcctattgggaaagtcactgcgacatgattaatggtacagatgcagcctcatttccaccttttgttgagaaaagccaggtattgcagttcttttcttctgatatttgcaggtcaatctatgctgtatttgaatccgacgttaatctgaaaggaatccctgtgtatagatttgttcttccatccaaggcctttgcctctccagttgaaaacccagacaactattgtttctgcacagaaaaaattatctcaaaaaattgtacatcatatggtgtgctagacatcagcaaatgcaaagaagggagacctgtgtacatttcacttcctcattttctgtatgcaagtcctgatgtttcagaacctattgatggattaaacccaaatgaagaagaacataggacatacttggatattgaacctataactggattcactttacaatttgcaaaacggctgcaggtcaacctattggtcaagccatcagaaaaaattcaagtattaaagaatctgaagaggaactatattgtgcctattctttggcttaatgagactgggaccattggtgatgagaaggcaaacatgttcagaagtcaagtaactggaaaaataaacctccttggcctgatagaaatgatcttactcagtgttggtgtggtgatgtttgttgcttttatgatttcatattgtgcatgcagatcgaaaacaataaaataaacctggctcaagcacaaaccaatttgtgttgttctgattcaataattggtttctgggtggccaattcagaagaagagtgtacatgctcaacagtctccaggaccatcagtatactgcatttcatgtgcaccaaatattttgaaagacatttataaataattggcttatgactcatatttctctatgaataccttcatacagcaggtataactcttttctttatgggcttaaatattttgtcactgatcctgcaaatggacatcattttagcacactagcggtttatattttaaggaccttcattctctgttctgcacctcttctggaaattgagtaaattttgctttttttttttactcagttgcaacttacgcttggcatcttcagaatgcttttctagcattaagagatgtaaatgataaaggaattattgtatgaaatattacaaagcgtagactatgcattgttattcattataatattttttgctgtcataatcgcctcataaagacaggtttcaaccattaaaatatgttcttcctt

SEQ ID NO: 1978 - DNA, 291 bp, Homo sapiens
tacaggtcaaaaaatgtagaaaatatcattttatattccctaatctatatagctgaaaaagggttgtattttcttagctgaatatgaatacctcttaaacataaattagttcctctccagtgaagtatcttattttaccaatccatttcaggaaagaggttctgctgccgtaaagcgagaaattttatttttatcccttttatttgaatgagagatttgaaaatcgaattatgtaaatatttcaatgcatctgctattattttgtggagtttattaaactactttaaaaaa

SEQ ID NO: 1979 - DNA, 550 bp, Homo sapiens
  misc_feature: n=a,t,g or c
ntaatactgagagcggaagatttttttaaagagatatggtagtttaaataggtttgtttaaagaactcttgggaaatttcttaacaaattgtaattgtttttataaaccttcctacagagttgtgtaccattcatcatcaccatcatttaatatctgtaagtgcccagaaggtacaaggtgctatacagccgttaaacaccccctccctgcaactgtttaaaattagaatagatttttgcatcaaccactgctagaagctttccccacctaggtggcctggcaagggcctgcattcccaacatcccattacatgtttcccactccagaaagtctctggggtttattccagcntttttatcntggacgtgtcccntttcaccccctgggtttgggttgggttgggtttgttttttaaantcaggaaagttttcagggattcaaagggggtcnggacnttttttaacccggcggagtacaggtccntttttttgctanggttttgttgtggtacaggnaaccccanttggccnttagtgtgtgggtagttgt

SEQ ID NO: 1980 - DNA, 123 bp, Homo sapiens; identical to SEQ ID NO: 1316

SEQ ID NO: 1981 - DNA, 298 bp, Homo sapiens; identical to SEQ ID NO: 1343

SEQ ID NO: 1982 - DNA, 301 bp, Homo sapiens; identical to SEQ ID NO: 409
  misc_feature: n=a,t,g or c

SEQ ID NO: 1983 - DNA, 2015 bp, Homo sapiens
cggaggcacggaagatgaggaagatgatcaggaggatgatgaaggtgaagagggagatgaagacgatgacgacgatggctctgaggggacctcaggggctgccgagctgggggggcgctcaagctgcgaggatccgggctgcccgcgagacgaggagcgggcgccaggatggggtcgatgaagtccaagttcctccaggtcggaggcaatacattctcaaaaactgaaaccagcgccagcccacactgtcctgtgtacgtgccggatcccacatccaccatcaagccggggcctaatagccacaacagcaacacaccaggaatcagggaggcaggctctgaggacatcatcgtggttgccctgtatgattacgaggccattcaccacgaagacctcagcttccagaagggggaccagatggtggtcctagaggaatccggggagtggtggaaggctcgatccctggccacccggaaggagggctacatcccaagcaactatgtcgcccgcgttgactctctggagacagaggagtggtttttcaagggcatcagccggaaggacgcagagcgccaactgctggctcccggcaacatgctgggctccttcatgatccgggatagcgagaccactaaaggaagctactctttgtccgtgcgagactacgaccctcggcagggagataccgtgaaacattacaagatccggaccctggacaacgggggcttctacatatccccccgaagcaccttcagcactctgcaggagctggtggaccactacaagaaggggaacgacgggctctgccagaaactgtcggtgccctgcatgtcttccaagccccagaagccttgggagaaagatgcctgggagatccctcgggaatccctcaagctggagaagaaacttggagctgggcagtttggggaagtctggatggccacctacaacaagcacaccaaggtggcagtgaagacgatgaagccagggagcatgtcggtggaggccttcctggcagaggccaacgtgatgaaaactctgcagcatgacaagctggtcaaacttcatgcggtggtcaccaaggagcccatctacatcatcacggagttcatggccaaaggaagcttgctggactttctgaaaagtgatgagggcagcaagcagccattgccaaaactcattgacttctcagcccagattgcagaaggcatggccttcatcgagcagaggaactacatccaccgagacctccgagctgccaacatcttggtctctgcatccctggtgtgtaagattgctgactttggcctggcccgggtcattgaggacaacgagtacacggctcgggaaggggccaagttccccatcaagtggacagctcctgaagccatcaactttggctccttcaccatcaagtcagacgtctggtcctttggtatcctgctgatggagatcgtcacctacggccggatcccttacccagggatgtcaaaccctgaagtgatccgagctctggagcgtggataccggatgcctcgcccagagaactgcccagaggagctctacaacatcatgatgcgctgctggaaaaaccgtccggaggagcggccgaccttcgaatacatccagagtgtgctggatgacttctacacggccacagagagccagtaccaacagcagccatgatagggaggaccagggcagggcagggggtgcccaggtggtggctcgaaggtggctccagcaccatccgccagggcccacacccccttcctactcccagacacccaccctcgcttcagccacagtttcctcatctgtccagtgggtaggttggactggaaaatctctttttgactcttgcaatccacaatctgacattctcaggaagcccccaagttgatatttctatttcctggaatggttggattttagttacagctgtgatttggaagggaaactttcaaaatagtgaaatgaatatttaaataaaagatataaatgcaagtcttacg

SEQ ID NO: 1984 - DNA, 262 bp, Homo sapiens
taacaaatggatgactttattacgagagaaggacaagactgatgtttaccttggtcaaaccatccaggaaaacaaagcacacagacttatagaatactttggtttaaaaattattcataatatcaatattaaacctgatgtttaaagaacctaatgagaaatatagtgtaaaaaacaaaccatgaaaacacaagtttgcatagatgaattaatgtagatgtacaattggcatttaaaaaaggaggtttgcgttttgggagtg

SEQ ID NO: 1985 - DNA, 387 bp, Homo sapiens
ttttatctgcacatactaagttgcttttattaatccagaacggcatgctacagatactgtacagcatgaacatttattcattacaaaaatggcttccaaaccattaaaaatgaacttggaataagagcataaaacggaacagtaacatcacaactgttaggaaacattcaaagtattcacaaaaaatgttatagttagcattttaataaaccagagaaaaatcggagacagttttacaatcgcttcatgtcaactacaatggcactgaatgaacaggtttcagctttatacagcattttgcaacatcaacatgcctaggttttttttatttttaaagtctgctgcctactcgtatgtaatatgtgtacataaaagcggcctgggttt

SEQ ID NO: 1986 - DNA, 374 bp, Homo sapiens
  misc_feature: n=a,t,g or c
aattttaatagataaatgtaaatttgactgtgtaataccaaatggaaagtagctgaaccacacagagaaaacaaggctttacgtatctccaaatttagctgttttacaataaacaaagtattagaacatgtgaatattagaacctccttctaactggaaagatttcttcagtaagctataaccgaaattaatataaactaaaattanaatttctaaaataagaattaacaaaccaaatttaagtatttttagtcagagattgaaacaaaataagcacagtgatctagaaaccaaatatactggnttatgtaactatcgtatcaaggtacagacattcttcacatggctacaagggttagcatttctcctcgtgg

SEQ ID NO: 1987 - DNA, 411 bp, Homo sapiens
  misc_feature: n=a,t,g or c
tttntntgcaaagagaaataggctcgtttattnattcattgatcaactggcacttcttgaaancctgctgtgtgccaagcctttccccaaaggaggatatcagtgnnnnagnaagtctcagggtggaaaggacctggaccacacagagcaggactccagagcctcctccatatggcaggaatcaagctttcacaggggaaacgcaggatttcccacacatgcccatgcaacacttcaagtcacgcttgcactggccatccatctcacagaaattgggggggttnagcatcnaacattggccanaantcactnggnacttnccaagggttncnccttgttgggnttnggggggtnnacaggggncccggcanttnatgcnccaagtttcngggcaaanatttcttttttccc

SEQ ID NO: 1988 - DNA, 492 bp, Homo sapiens
tggtatagctcatgagtctcacacccaggtgaattccctagtgctataggatttgattcatttatggtctcccattatttatactgtatttgtttttcattgattttattctttgcagtcggatacttctggagactatgaaatcacactcttaaaaatctgtggtggagatgactgaaccaagaagataatctccaaaggtccacgatgggcttttccaacagctccaccttacttcttctcatactatttaagagaacaagcaaatataaacagcaacttgtgttcctaacaggaattttcattgttctataacaacaacaacaaaagcgattattattttagagcatctcatttataatgtagcagctcataaatgaaattgaaaatggtattaaagatctgcaactactatccaacttatatttctgctttcaaagttaagaatctttatagttctactccattaaatataaagcaagataataaaac

SEQ ID NO: 1989 - DNA, 594 bp, Homo sapiens
gtcactcctgccttcaccatgaagtccagcggcctcttccccttcctggtgctgcttgccctgggaactctggcaccttgggctgtggaaggctctggaaagtccttcaaagctggagtctgtcctcctaagaaatctgcccagtgccttagatacaagaaacctgagtgccagagtgactggcagtgtccagggaagaagagatgttgtcctgacacttgtggcatcaaatgcctggatcctgttgacaccccaaacccaacaaggaggaagcctgggaagtgcccagtgacttatggccaatgtttgatgcttaacccccccaatttctgtgagatggatggccagtgcaagcgtgacttgaagtgttgcatgggcatgtgtgggaaatcctgcgtttcccctgtgaaagcttgattcctgccatatggaggaggctctggagtcctgctctgtgtggtccaggtcctttccaccctgagacttggctccaccactgatatcctcctttggggaaaggcttggcacacagcaggctttcaagaagtgccagttgatcaatgaataaataaacgagcctatttctctttgcac

SEQ ID NO: 1990 - DNA, 607 bp, Homo sapiens
  misc_feature: n=a,t,g or c
tagccctgaaccaggagcaacagggtcagcttctggaggttggttggaacaatacggcaagtgctcgaaatgacatccagagaaatctaaactgctgtgggttccgaagtgttaacccaaatgacacctgtctggctagctgtgttaaaagtgaccactcgtgctcgccatgtgctccaatcataggagaatatgctggagaggttttgagatttgttggtggcattggcctgttcttcagttttacagagatcctgggtgtttggctgacctacagatacaggaaccagaaagacccccgcgcgaatcctagtgcattcctttgatgagaaaacaaggaagatttcctttcgtattatgatcttgttcactttctgtaattttctgttaagctccatttgccagtttaagggaaggaaacactattctgggaaagtaccttattgatagtgggattattatatttttacttctatgtttctctacatgtttttttttttcccntgctgaaaatatttgnaacttgtggnctccgaggtccgtggccccgganttactgtattcattgtcgggantttcnctgtggccttctaggattttacccgag

SEQ ID NO: 1991 - DNA, 418 bp, Homo sapiens
ggttttgaacctttaataaaagtaaaaaatgaatgcaaaaagaacacaatgttgaaaacttagtatgaatgtgaacctcactagatgttcaaatctggtagagtgcaaattttgttcatactattttacatttttacaaactcaaatcactttggttcatatattttctataaactattggcaaaaaaatcctcaaatttacattcttttggctacattatttctaacagatatagatttacttccggtttcggagagaaagacttattgtgtgtgcgtgatcaagtctgttttaaagattcactcgctgctttcatctaataacttctggtttttcataaaatgctgacatcttcattggaaatttttttcatgtaactgttttcattttcagaaaatatataagggggtcattccg

SEQ ID NO: 1992 - DNA, 244 bp, Homo sapiens
  misc_feature: n=a,t,g or c
ggttcctttaagcttatttaatatttgaaatcttatttnctatttncccagaccccagaaaacagaaagtttttagatgaccaatattttgttccagaaacatacagccttatcagctaattgcataaaagagcctattttacaaaggtacatctggataattaggaacaataaagtncttttagggcatttgcaaaatgtggatcagtaaaaatacatggattattcaataaagtttttttaa

SEQ ID NO: 1993 - DNA, 3038 bp, Homo sapiens
gcgtgaggaaagtaccaaacagcagcggagttttaaactttaaatagacaggtctgagtgcctgaacttgccttttcattttacttcatcctccaaggagttcaatcacttggcgtgacttcactacttttaagcaaaagagtggtgcccaggcaacatgggtgactggagcgccttaggcaaactccttgacaaggttcaagcctactcaactgctggagggaaggtgtggctgtcagtacttttcattttccgaatcctgctgctggggacagcggttgagtcagcctggggagatgagcagtctgcctttcgttgtaacactcagcaacctggttgtgaaaatgtctgctatgacaagtctttcccaatctctcatgtgcgcttctgggtcctgcagatcatatttgtgtctgtacccacactcttgtacctggctcatgtgttctatgtgatgcgaaaggaagagaaactgaacaagaaagaggaagaactcaaggttgcccaaactgatggtgtcaatgtggacatgcacttgaagcagattgagataaagaagttcaagtacggtattgaagagcatggtaaggtgaaaatgcgaggggggttgctgcgaacctacatcatcagtatcctcttcaagtctatctttgaggtggccttcttgctgatccagtggtacatctatggattcagcttgagtgctgtttacacttgcaaaagagatccctgcccacatcaggtggactgtttcctctctcgccccacggagaaaaccatcttcatcatcttcatgctggtggtgtccttggtgtccctggccttgaatatcattgaactcttctatgttttcttcaagggcgttaaggatcgggttaagggaaagagcgacccttaccatgcgaccagtggtgcgctgagccctgccaaagactgtgggtctcaaaaatatgcttatttcaatggctgctcctcaccaaccgctcccctctcgcctatgtctcctcctgggtacaagctggttactggcgacagaaacaattcttcttgccgcaattacaacaagcaagcaagtgagcaaaactgggctaattacagtgcagaacaaaatcgaatggggcaggcgggaagcaccatctctaactcccatgcacagccttttgatttccccgatgataaccagaattctaaaaaactagctgctggacatgaattacagccactagccattgtggaccagcgaccttcaagcagagccagcagtcgtgccagcagcagacctcggcctgatgacctggagatctagatacaggcttgaaagcatcaagattccactcaattgtggagaagaaaaaaggtgctgtagaaagtgcaccaggtgttaattttgatccggtggaggtggtactcaacagccttattcatgaggcttagaaaacacaaagacattagaatacctaggttcactgggggtgtatggggtagatgggtggagagggaggggataagagaggtgcatgttggtatttaaagtagtggattcaaagaacttagattataaataagagttccattaggtgatacatagataagggctttttctccccgcaaacacccctaagaatggttctgtgtatgtgaatgagcgggtggtaattgtggctaaatatttttgttttaccaagaaactgaaataattctggccaggaataaatacttcctgaacatcttaggtcttttcaacaagaaaaagacagaggattgtccttaagtccctgctaaaacattccattgttaaaatttgcactttgaaggtaagctttctaggcctgaccctccaggtgtcaatggacttgtgctactatatttttttattcttggtatcagtttaaaattcagacaaggcccacagaataagattttccatgcatttgcaaatacgtatattctttttccatccacttgcacaatatcattaccatcactttttcatcattcctcagctactactcacattcatttaatggtttctgtaaacatttttaagacagttgggatgtcacttaacattttttttttttgagctaaagtcagggaatcaagccatgcttaatatttaacaatcacttatatgtgtgtcgaagagtttgttttgtttgtcatgtattggtacaagcagatacagtataaactcacaaacacagatttgaaaataatgcacatatggtgttcaaatttgaacctttctcatggatttttgtggtgtgggccaatatggtgtttacattatataattcctgctgtggcaagtaaagcacactttttttttctcctaaaatgtttttccctgtgtatcctattatggatactggttttgttaattatgattctttattttctctcctttttttaggatatagcagtaatgctattactgaaatgaatttcctttttctgaaatgtaatcattgatgcttgaatgatagaattttagtactgtaaacaggctttagtcattaatgtgagagacttagaaaaaatgcttagagtggactattaaatgtgcctaaatgaattttgcagtaactggtattcttgggttttcctacttaatacacagtaattcagaacttgtattctattatgagtttagcagtcttttggagtgaccagcaactttgatgtttgcactaagattttatttggaatgcaagagaggttgaaagaggattcagtagtacacatacaactaatttatttgaactatatgttgaagacatctaccagtttctccaaatgccttttttaaaactcatcacagaagattggtgaaaatgctgagtatgacacttttcttcttgcatgcatgtcagctacataaacagttttgtacaatgaaaattactaatttgtttgacattccatgttaaactacggtcatgttcagcttcattgcatgtaatgtagacctagtccatcagatcatgtgttctggagagtgttctttattcaataaagttttaatttagtataaacat

SEQ ID NO: 1994 - DNA, 410 bp, Homo sapiens
gtgaaagcatgtgatcatactaacccagcctcctggaatgtcgctgtacgatgattgatgtctttttctcagtccatagttacaattgtttagtatgctaatcagtccagttccctgaggtttaagatcaaatataaattactctgcttttcgactcattcaggtagcattgtacctgaacctgattgctactttttcatcttaaatattatatttcctcatctaatctgccttcccctcgtccacagacatttggagaaggaaatgggagggtgtctgttatccctttctctttgctttgtccccgttgttagactggcagcgtcagttgctcggtgggcttggttagagccgtgggtgaggcaggtggctggcggggacagggagaggctgagagggaagtggtggca

SEQ ID NO: 1995 - DNA, 427 bp, Homo sapiens
tttttttttttttttttaaatcatctttaatgtatttttaataatttttttgcctcatttaccagataaatcatctaaataaatagatgctatacagtctcttaccaatgtcagtacaaaaataaaaccgcgctctacatccactctgactctcccagcacacacacactcagcaaaggcatgtgcttggaatcaactcgtgcccccgacccctcccagatacattcatttagtctgaacaaagctcgaagctcattctgtgcaaaggaagcgctcttgtgctgagacctggtggccgcagctggccacttcgaaagcaaaagctaaaccacctcacagaagcacagcgcctgcccccagaacaaggggacaggaggagcttggcaacgaggtcatcacccgaacagcagtgacagtcctgcattcc

SEQ ID NO: 1996 - DNA, 5959 bp, Homo sapiens
gaattccggatgctcagatgaaagccccgagatcacagagacccggcgagatcacagagacccggcctgaaggaacgtggaaagaccaatgtacctgttttgaccggttgcctggagcaagaagttccagttggggagaattttcagaagataaagtcggagattgtggaaagacttgacttgcagcattactctactgactggcagagacaggagaggtagatgtcaacgcccacagaccctggtgcgatgccccacccagggccttcgccgggtcctgggccttcccctgggccaattcttgggcctagtccaggaccaggaccatccccaggttccgtccacagcatgatggggccaagtcctggacctccaagtgtctcccatcctatgccgacgatggggtccacagacttcccacaggaaggcatgcatcaaatgcataagcccatcgatggtatacatgacaaggggattgtagaagacatccattgtggatccatgaagggcactggtatgcgaccacctcacccaggcatgggccctccccagagtccaatggatcaacacagccaaggttatatgtcaccacacccatctccattaggagccccagagcacgtctccagccctatgtctggaggaggcccaactccacctcagatgccaccaagccagccgggggccctcatcccaggtgatccgcaggccatgagccagcccaacagaggtccctcacctttcagtcctgtccagctgcatcagcttcgagctcagattttagcttataaaatgctggcccgaggccagcccctccccgaaacgctgcagcttgcagtccaggggaaaaggacgttgcctggcttgcagcaacaacagcagcagcaacagcagcagcagcagcagcagcagcagcagcagcagcagcaacagcagccgccgcaaccacagacgcagcaacaacagcagccggcccttgttaactacaacagaccatctggcccggggccggagctgagcggcccgagcaccccgcagaagctgccggtgcccgcgcccggcggccggccctcgcccgcgccccccgcagccgcgcagccgcccgcggccgcagtgcccgggccctcagtgccgcagccggccccggggcagccctcgcccgtcctccagctgcagcagaagcagagccgcatcagccccatccagaaaccgcaaggcctggaccccgtggaaattctgcaagagcgggaatacagacttcaggcccgcatagctcataggatacaagaactggaaaatctgcctggctctttgccaccagatttaagaaccaaagcaaccgtggaactaaaagcacttcggttactcaatttccagcgtcagctgagacaggaggtggtggcctgcatgcgcagggacacgaccctggagacggctctcaactccaaagcatacaaacggagcaagcgccagactctgagagaagctcgcatgaccgagaagctggagaagcagcagaagattgagcaggagaggaaacgccgtcagaaacaccaggaatacctgaacagtattttgcaacatgcaaaagattttaaggaatatcatcggtctgtggccggaaagatccagaagctctccaaagcagttgcaacttggcatgccaacactgaaagagagcagaagaaggagacagagcggattgaaaaggagagaatgcggcgactgatggctgaagatgaggagggttatagaaaactgattgatcaaaagaaagacaggcgtttagcttaccttttgcagcagaccgatgagtatgtagccaatctgaccaatctggtttgggagcacaagcaagcccaggcagccaaagagaagaagaagaggaggaggaggaagaagaaggctgaggagaatgcagagggtggggagtctgccctgggaccggatggagagcccatagatgagagcagccagatgagtgacctccctgtcaaagtgactcacacagaaaccggcaaggttctgttcggaccagaagcacccaaagcaagtcagctggacgcctggctggaaatgaatcctggttatgaagttgcccctagatctgacagtgaagagagtgattctgattatgaggaagaggatgaggaagaagagtccagtaggcaggaaaccgaagagaaaatactcctggatccaaatagcgaagaagtttctgagaaggatgctaagcagatcattgagacagctaagcaagacgtggatgatgaatacagcatgcagtacagtgccaggggctcccagtcctactacaccgtggctcatgccatctcggagtgggtggagaaacagtctgccctcctaattaatgggaccctaaagcattaccagctccagggcctggaatggatggtttccctgtataataacaacttgaacggaatcttagccgatgaaatggggcttggaaagaccatacagaccattgcactcatcacttatctgatggagcacaaaagactcaatggcccctatctcatcattgttcccctttcgactctatctaactggacatatgaatttgacaaatgggctccttctgtggtgaagatttcttacaagggtactcctgccatgcgtcgctcccttgtcccccagctacggagtggcaaattcaatgtcctcttgactacttatgagtatattataaaagacaagcacattcttgcaaagattcggtggaaatacatgatagtggacgaaggccaccgaatgaagaatcaccactgcaagctgactcaggtcttgaacactcactatgtggcccccagaaggatcctcttgactgggaccccgctgcagaataagctccctgaactctgggccctcctcaacttcctcctcccaacaatttttaagagctgcagcacatttgaacaatggttcaatgctccatttgccatgactggtgaaagggtggacttaaatgaagaagaaactatattgatcatcaggcgtctacataaggtgttaagaccatttttactaaggagactgaagaaagaagttgaatcccagcttcccgaaaaagtggaatatgtgatcaagtgtgacatgtcagctctgcagaagattctgtatcgccatatgcaagccaaggggatccttctcacagatggttctgagaaagataagaaggggaaaggaggtgctaagacacttatgaacactattatgcagttgagaaaaatctgcaaccacccatatatgtttcagcacattgaggaatcctttgctgaacacctaggctattcaaatggggtcatcaatggggctgaactgtatcgggcctcagggaagtttgagctgcttgatcgtattctgccaaaattgagagcgactaatcaccgagtgctgcttttctgccagatgacatctctcatgaccatcatggaggattattttgcttttcggaacttcctttacctacgccttgatggcaccaccaagtctgaagatcgtgctgctttgctgaagaaattcaatgaacctggatcccagtatttcattttcttgctgagcacaagagctggtggcctgggcttaaatcttcaggcagctgatacagtggtcatctttgacagcgactggaatcctcatcaggatctgcaggcccaagaccgagctcaccgcatcgggcagcagaacgaggtccgggtactgaggctctgtaccgtgaacagcgtggaggaaaagatcctcgcggccgcaaaatacaagctgaacgtggatcagaaagtgatccaggcgggcatgtttgaccaaaagtcttcaagccacgagcggagggcattcctgcaggccatcttggagcatgaagaggaaaatgaggaagaagatgaagtaccggacgatgagactctgaaccaaatgattgctcgacgagaagaagaatttgacctttttatgcggatggacatggaccggcggagggaagatgcccggaacccgaaacggaagccccgtttaatggaggaggatgagctgccctcctggatcattaaggatgacgctgaagtagaaaggctcacctgtgaagaagaggaggagaaaatatttgggagggggtcccgccagcgccgtgacgtggactacagtgacgccctcacggagaagcagtggctaagggccatcgaagacggcaatttggaggaaatggaagaggaagtacggcttaagaagcgaaaaagacgaagaaatgtggataaagatcctgcaaaagaagatgtggaaaaagctaagaagagaagaggccgccctcccgctgagaaactgtcaccaaatccccccaaactgacaaagcagatgaacgctatcatcgatacgtgtataaactacaaagatagttgtaacgtggagaaggtgcccagtaattctcagttggaaatagaaggaaacagttcagggcgacagctcagtgaagtcttcattcagttaccttcaaggaaagaattaccagaatactatgaattaattaggaagccagtggatttcaaaaaaataaaggaaaggattcgtaatcataagtaccggagcctaggcgacctggagaaggatgtcatgcttctctgtcacaacgctcagacgttcaacctggagggatcccagatctatgaagactccatcgtcttacagtcagtgtttaagagtgcccggcagaaaattgccaaagaggaagagagtgaggatgaaagcaatgaagaggaggaagaggaagatgaagaagagtcagagtccgaggcaaaatcagtcaaggtgaaaattaagctcaataaaaaagatgacaaaggccgggacaaagggaaaggcaagaaaaggccaaatcgaggaaaagccaaacctgtagtgagcgattttgacagcgatgaggagcaggatgaacgtgaacagtcagaaggaagtgggacggatgatgagtgatcagtatggacctttttccttggtagaactgaattccttcctcccctgtctcatttctacccagtgagttcatttgtcatataggcactgggttgtttctatatcatcatcgtctataaactagctttaggatagtgccagacaaacatatgatatcatggtgtaaaaaacacacacatacacaaatatttgtaacatattgtgaccaaatgggcctcaaagattcagattgaaacaaacaaaaagcttttgatggaaaatatgtgggtggatagtatatttctatgggtgggtctaatttggtaacggtttgattgtgcctggttttatcacctgttcagatgagaagatttttgtcttttgtagcactgataaccaggagaagccattaaaagccactggttattttatttttcatcaggcaattttcgaggtttttatttgttcggtattgtttttttacactgtggtacatataagcaactttaataggtgataaatgtacagtagttagatttcacctgcatatacgtttttccattttatgctctatgatctgaacaaaagctttttgaattgtataagatttatgtctactgtaaacattgcttaatttttttgctcttgatttaaaaaaaagttttgttgaaagcgctattgaatattgcaatctatatagtgtattggatggcttcttttgtcaccctgatctcctatgttaccaatgtgtatcgtctccttctccctaaagtgtacttaatctttgctttctttgcacaatgtctttggttgcaagtcataagcctgaggcaaataaattccagtaatttcgaagaatgtggtgttggtgctttcctaataaagaaataatttcgcttgaaaaaaaaaaaaaaaaaaaaaaaaaaaaaaaaaaaaaaaaaaaaaaaaaaaaaaaaaaaaaaaaaaaaaaaaaaaaaaaaaaaaaaaaaaggaattc

SEQ ID NO: 1997 - DNA, 607 bp, Homo sapiens
  misc_feature: n=a,t,g or c
caaattttatttgtatacaaaaatatattataatgngaaagcttactgctatttccaactatatataattaattacaaatattttcataaaagcactttaaattacaggaaagctatgttttaagagaaaatacaatattagcatggatcgtctgttctaatatgctgcaagaggtaaacaaagtcagtttcactgtctaaattgcccagaaatgggatcaagggctgattttaaggtgagcctgagagtggcctggtagaaggttnagtgcacgtctttgtcccctctggcagcagattctagtagctgattttagcaggtcctcggaactttctgaagcttctcccttatgatgaaaggacccagaacttcttgtttcacatacttgctaaagttttgtcaagatcagcaatgaaggcttctagctcnttngtgtctcctaatttagctttctgaggagtgacagtggcagagagaagagctggggtagagtctgttggagaattcagnttttcatcactgaagctgagctgttcctataaagtgaatntgcactctccgagtcgctgaagccgctgttgtcgctgcgcttggctgctcgcnttc

SEQ ID NO: 1998 - DNA, 668 bp, Homo sapiens
  misc_feature: n=a,t,g or c
accacctgactcagacttctttgtcgttgttttatttaaaatgttattgtctctgattagaaaatacagtcatgagggctaaaaactgaaatgatgtgaaaaggcatccattaagcagtgttgccccaccaccctttccatcagtcttgtctcatggggatggggaaaatgaagacagaacgctttgccttgctttgcaatccctcctttgaaggccttctgtcccaggaagccaatgttcatttgatgtggaagagggacctgtgtttaaccagaagctgtcctccctcatccctttcccatggcttacacgcagaagggagaggagatgaccagaggagaaatcaggggaagaaaaggcaacaggggaggcaaagggaaaggagaggaatgcttaaaatatacagtgaaatttgagtaggattctctactcaaagacttctctgggaagtgtccagaattgaccacacaggtgctgacggtagaaagaacacagacccanaaccctgatctagttgcattaactccattagccctgagttccctgtaaaatgaagactgtngaggaccactagaggattctgtgacttctcaactctaaaattttggactggacctcgtgcgaatctggctcgaggcaaattcctatgtggcgatnaatcgnacag

SEQ ID NO: 1999 - DNA, 262 bp, Homo sapiens
ccttcttttacctttatattgatatttaaaagaaaaagaacatgatggatacgggaatgggggaagggacaacggttctacgattaacaacaggaactgataggaaccagaagctccaaggatttaaaaaaaaataaaatatatatttatacatttatatatatatatatatatcacgttatgtatgtgagtcccagacaagcaggaagcagcagcaagaagcaactagcacacagaaacacccgtgcgtgtgcactacaca

SEQ ID NO: 2000 - DNA, 214 bp, Homo sapiens
  misc_feature: n=a,t,g or c
cacannntnnggaacattttattcctcaggacgctacacgntcactttcctggcggnaggntcagtgcatcgagttctgtttccgtggaaaatgtgcaccttggaaactgcatgacagccccctcggcagggtccccgcggatccgccggaacgcaggcacagcagcaagttcctccagcacgaagntggcctgcccgggcccagggtttgagg

SEQ ID NO: 2001 - DNA, 5759 bp, Homo sapiens
ataccctgtggtgctagtgtaaaatcaaatataatctacctctttagcttttctgttatgtaattggaatgaaaaaatagtgcttttttttttttttcatttttgagattgagttaccatggagggaaagaacatgtgttttaccagtggaacgcattctttgtgttatctcttcgatttttaacattttatgtttccagtttataaactttgcctccagtttgatgaagaaaatttagctattagaaagtatttaaaatctcaaaagtatgacattttaaaatgttagcaggtttaaagataacttagtttttcaactcttaacccaaaattatacttgtatactataatttgtgttgaattacttggtattatttatcatcctagtaagatctattttatataatttgattcactttttatattgaattatgttaattgtttttgtaatacacctttcatatttcttcaaagaaaactagtgttgggttattgctaattttgcttcgtggtttggttatttacatataaaaattatattgttttaaaaattgcaaagtgatcatttattgacacatcagcaagaattaatgttgaaatgcaagttttttcccctatccttaactaagtgtgtagatatctttgttttgtttctttaatagatagcaaacaataaagatgcattgaggaagacatggaaccctaagtttacattgagaagtcactttgatggcatccgagcccttgctttccatcccattgagcctgttttgataacagcatcagaggatcacacattaaaaatgtggaatttacagaaaacagccccagccaaaaagtgagaatattctactttaacattatttgaatattttaagtaacattttcagcagaaaactacatattttatgatttctgttaaatttcccaaacatttcttctagttctttcttccatgtcatgtaatttattgtgtttttccatttatacaacctaatgctaggttagaaaactgatgcttaggaagatatggtattatcttttggtttcaccagggtttgtgaatactgattacagtctttatacataacagtatttttaaatggctgctatatttggggagccccttgtctatactgaaggtttggactgttcttgtaaacaggtatatgcatctttaaaataatcaaatgtccacctccaccttgccccattgtttactagatttagacttatgagatggagcagagaaaagcctcactgggatgggtggagggtcttggtcttgtcttttggccttgagactttaggtactttccatacccaccaatatgtctagactcagaggctaacatgactgctagtgctcaccttggccctttagttcctgtctaagcatggatagacatgagttagtataaaccctttaaaagtcacaaagctaaatctggttctacttgcttgggtccttatcggagctccactcctttgggtcacatgtcaaaaaaaaaaaaaaaaaggcgccgtccgctgcgctgggggctcggtctatgacgagcagcggggtctgccatgggtcgggggctgctcaggggcctgtggccgctgcacatcgtcctgtggacgcgtatcgccagcacgatcccaccgcacgttcagaagtcggttaataacgacatgatagtcactgacaacaacggtgcagtcaagtttccacaactgtgtaaattttgtgatgtgagattttccacctgtgacaaccagaaatcctgcatgagcaactgcagcatcacctccatctgtgagaagccacaggaagtctgtgtggctgtatggagaaagaatgacgagaacataacactagagacagtttgccatgaccccaagctcccctaccatgactttattctggaagatgctgcttctccaaagtgcattatgaaggaaaaaaaaaagcctggtgagactttcttcatgtgttcctgtagctctgatgagtgcaatgacaacatcatcttctcagaagaatataacaccagcaatcctgacttgttgctagtcatatttcaagtgacaggcatcagcctcctgccaccactgggagttgccatatctgtcatcatcatcttctactgctaccgcgttaaccggcagcagaagctgagttcaacctgggaaaccggcaagacgcggaagctcatggagttcagcgagcactgtgccatcatcctggaagatgaccgctctgacatcagctccacgtgtgccaacaacatcaaccacaacacagagctgctgcccattgagctggacaccctggtggggaaaggtcgctttgctgaggtctataaggccaagctgaagcagaacacttcagagcagtttgagacagtggcagtcaagatctttccctatgaggagtatgcctcttggaagacagagaaggacatcttctcagacatcaatctgaagcatgagaacatactccagttcctgacggctgaggagcggaagacggagttggggaaacaatactggctgatcaccgccttccacgccaagggcaacctacaggagtacctgacgcggcatgtcatcagctgggaggacctgcgcaagctgggcagctccctcgcccgggggattgctcacctccacagtgatcacactccatgtgggaggcccaagatgcccatcgtgcacagggacctcaacagctccaatatcctcgtgaagaacgacctaacctgctgcctgtgtgactttgggctttccctgcgtctggaccctactctgtctgtggatgacctggctaacagtgggcaggtgggaactgcaagatacatggctccagaagtcctagaatccaggatgaatttggagaatgctgagtccttcaagcagaccgatgtctactccatggctctggtgctctgggaaatgacatctcgctgtaatgcagtgggagaagtaaaagattatgagcctccatttggttccaaggtgcgggagcacccctgtgtcgaaagcatgaaggacaacgtgttgagagatcgagggcgaccagaaattcccagcttctggctcaaccaccagggcatccagatggtgtgtgagacgttgactgagtgctgggaccacgacccagaggcccgtctcacagcccagtgtgtggcagaacgcttcagtgagctggagcatctggacaggctctcggggaggagctgctcggaggagaagattcctgaagacggctccctaaacactaccaaatagctcttctggggcaggctgggccatgtccaaagaggctgcccctctcaccaaagaacagaggcagcaggaagctgcccctgaactgatgcttcctggaaaaccaagggggtcactcccctccctgtaagctgtggggataagcagaaacaacagcagcagggagtgggtgacatagagcattctatgccttttacattgtcataggataagctgtgttagcacttcctcaggaaatgagattgattttacaatagccaataacatttgcactttattaatgcctgtatataaatatgaatagctatgttttatatatatatatatatatctatatatgtctatagctctatatatatagccataccttgaaaagagacaaggaaaaacatcaaatattcccaggaaattggttttattggagaactccagaaccaagcagagaaggaagggacccatgacagcattagcatttgacaatcacacatgcagtggttctctgactgtaaaacagtgaactttgcatgaggaaagaggctccatgtctcacagccagctatgaccacattgcacttgcttttgcaaaataatcattccctgcctagcacttctcttctggccatggaactaagtacagtggcactgtttgaggaccagtgttcccggggttcctgtgtgcccttatttctcctggacttttcatttaagctccaagccccaaatctggggggctagtttagaaactctccctcaacctagtttagaaactctaccccatctttaataccttgaatgttttgaaccccactttttaccttcatgggttgcagaaaaatcagaacagatgtccccatccatgcgattgccccaccatctactaatgaaaaattgttctttttttcatctttcccctgcacttatgttactattctctgctcccagccttcatccttttctaaaaaggagcaaattctcactctaggctttatcgtgtttactttttcattacacttgacttgattttctagttttctatacaaacaccaatgggttccatctttctgggctcctgattgctcaagcacagtttggcctgatgaagaggatttcaactacacaatactatcattgtcaggactatgacctcaggcactctaaacatatgttttgtttggtcagcacagcgtttcaaaaagtgaagccactttataaatatttggagattttgcaggaaaatctggatccccaggtaaggatagcagatggttttcagttatctccagtccacgttcacaaaatgtgaaggtgtggagacacttacaaagctgcctcacttctcactgtaaacattagctctttccactgcctacctggaccccagtctaggaattaaatctgcacctaaccaaggtcccttgtaagaaatgtccattcaagcagtcattctctgggtatataatatgattttgactaccttatctggtgttaagatttgaagttggccttttattggactaaaggggaactcctttaagggtctcagttagcccaagtttcttttgcttatatgttaatagttttaccctctgcattggagagaggagtgctttactccaagaagctttcctcatggttaccgttctctccatcatgccagccttctcaacctttgcagaaattactagagaggatttgaatgtgggacacaaaggtcccatttgcagttagaaaatttgtgtccacaaggacaagaacaaagtatgagctttaaaactccataggaaacttgttaatcaacaaagaagtgttaatgctgcaagtaatctcttttttaaaactttttgaagctacttattttcagccaaataggaatattagagagggactggtagtgagaatatcagctctgtttggatggtggaaggtctcattttattgagatttttaagatacatgcaaaggtttggaaatagaacctctaggcaccctcctcagtgtgggtgggctgagagttaaagacagtgtggctgcagtagcatagaggcgcctagaaattccacttgcaccgtagggcatgctgataccatcccaatagctgttgcccattgacctctagtggtgagtttctagaatactggtccattcatgagatattcaagattcaagagtattctcacttctgggttatcagcataaactggaatgtagtgtcagaggatactgtggcttgttttgtttatgtttttttttcttattcaagaaaaaagaccaaggaataacattctgtagttcctaaaaatactgacttttttcactactatacataaagggaaagttttattcttttatggaacacttcagctgtactcatgtattaaaataggaatgtgaatgctatatactctttttatatcaaaagtctcaagcacttatttttattctatgcattgtttgtcttttacataaataaaatgtttattagattg

SEQ ID NO: 2002 - DNA, 410 bp, Homo sapiens
cccagcttttcaaaagtttattttaagtttggagactagacaaggtcatactggttttacatcctacgtgatataagtatatatacaaagaaaaaaacaacattggaatattacacagcttgaaggtttgcaaaggttatttgtgtcttagttatttctgcacttaatgacacatcagacgcattgagtatatttcataagttgttgactagcaaagatacaatcattagtaacccaagtcttcaaaattcacaccaaactttatgaagtcattcagaaagagaaagtcaatcctaaaattaaaattggcaactatgataaataccttcaaaaggatgtagatgtaatggagatgtttaaaagtttagtttcattaattgtaaaattagcatgttatatttactcaatat

SEQ ID NO: 2003 - DNA, 218 bp, Homo sapiens
tttttttttttcttagcagacacaatgaatgaactgcaagcaaactaaaattctgttattaaaaaaaatcttttattaaaatgctcctggaaggagcaggtggtattgcatagtttgttcagatggcagtggtacacacacacatacacacacaagtggcctggagcaaaagtgcaaaatccgtagctggcctgtgggtcgggaagcctgtaggactg

SEQ ID NO: 2004 - DNA, 470 bp, Homo sapiens
tttttcaggatgtgacaacgtttttaatgcaaagtcaaccattagcatctttcccatgtacttattagatgtgaaatggcaggacttcacggccccgtttgcatattttcctactccgcagacgaataatattttcagggaaggcagcgcagtctgtgccgtcacaatcgggcgactgtgggtgatgagggatgatgattttccaggaggccctggggtcagaggactcctagagggagtttccagcccctcaatcgcagatggatggcctgttgatgttgtaactggggtggaagttgagccggtcacaggaggtgatgcagttatcggggccagtcacgatgcttttctccaggtaaacattgagagtattgttccggaacattccacccgctgcaagttgttgggaaaatttattcgaatttggataaaatactttaggcatctcgtgcacggtgggggctctgctc

SEQ ID NO: 2005 - DNA, 351 bp, Homo sapiens
  misc_feature: n=a,t,g or c
tgttcctaacacaaatgtgaatttattggttgatttgatatttaaaatagtacttttacaaaatcatctcagaaaatatactacatttattaaaattcctacaaaccattgcagaaaatattaaaccctctaaccaacctaacactcgctttcagaggcacttgtgatgattttcacagcttccatagttgcaaagaacaaagaaatcatcttccaacaggggtggaattagataagaataatccaaaaaatatttatttctttacagactcacagattgcttgatgtttaggggctcttacctaggatacctaattattcaagggtttccnaatttagtagactttttca

SEQ ID NO: 2006 - DNA, 7787 bp, Homo sapiens
gaattcggggaacggtgtggagcggaggccgcggaggctcctcggtccttcagcacccctcggcccgacgcacccacgcccctcaccccccgagagccgaaaatggacccaagtggggtcaaagtgctggaaacagcagaggacatccaggagaggcggcagcaggtcctagaccgataccaccgcttcaaggaactctcaacccttaggcgtcagaagctggaagattcctatcgattccagttctttcaaagagatgctgaagagctggagaaatggatacaggaaaaacttcagattgcatctgatgagaattataaagacccaaccaacttgcagggaaagcttcagaagcatcaagcatttgaagctgaagtgcaggccaactcaggagccattgttaagctggatgaaactggaaacctgatgatctcagaagggcattttgcatctgaaaccatacggacccgtttgatggagctgcaccgccagtgggaattacttttggagaagatgcgagaaaaaggaatcaaattgctgcaggcccagaacttggtgcagtacttacgagaatgtgaggacgtgatggactggatcaatgacaaggaagcaattgttacttctgaagagctgggccaggatctggagcatgtagaggttttacagaagaaatttgaagagtttcaaacagatatggctgctcatgaagaaagagttaatgaagtgaaccagtttgctgccaaactcatacaggagcagcaccctgaggaggaactgatcaagactaagcaggatgaagtcaatgcagcctggcagcggctgaagggcctggctctgcagaggcaggggaagctctttggggcagcagaagttcagcgctttaacagggatgtggatgagactatcagttggattaaggaaaaggagcagttaatggcctctgatgattttggccgagacctggcaagtgttcaggctctgcttcggaagcacgagggtctggagagagatcttgctgctctagaagacaaggtcaaagccctgtgtgctgaggctgaccgcctgcaacagtcccaccctctgagtgcaacacagattcaagtgaagcgagaggaactgattacaaactgggagcagatccgcaccttggcggcagagagacatgcacggctcaatgattcatacaggcttcaacgcttccttgctgacttccgtgacctcaccagctgggtgactgagatgaaagccctcatcaatgcagatgagcttgccagtgatgtggctggggctgaagccctgctagatagacaccaagagcacaagggtgaaattgatgcccatgaagacagcttcaaatctgcagatgaatctggacaggcactgcttgctgctggtcactatgcctcagatgaagtgagggagaagctgaccgtcctttccgaggagagagcggcgctgctggagctgtgggagctgcgcaggcagcagtacgagcagtgcatggacctgcagctcttctaccgggacactgagcaggtggacaactggatgagcaagcaggaggcgttcctgttgaatgaagacttgggagatttcttggatagtgtggaagcgcttcttaagaagcacgaagactttgagaaatcccttagtgcccaggaggaaaagattacagcattagatgaatttgcaaccaagctaattcagaacaaccactatgcaatggaagatgtggccactcgccgagacgctctgttgagccgccgcaatgcccttcacgagagagccatgcgtcgccgggcccagctagccgattctttccatctgcagcagtttttccgtgattctgatgagctcaagagttgggtgaatgagaagatgaaaactgccacagatgaagcttataaagatccatccaacctacaaggaaaagtacagaagcatcaggcttttgaggctgagctctcagcaaaccagagccgaattgatgccttggagaaagctggccaaaagctgattgatgtcaaccactatgccaaggatgaagtggcagctcgtatgaatgaggtgatcagtttgtggaagaaactgctagaggccactgaactgaaaggaataaagcttcgtgaagccaaccagcaacagcaatttaatcgcaatgttgaggatattgaattgtggctatatgaagtagaaggtcacttggcttcggatgattacggcaaagatcttaccaatgtgcagaacctccagaagaaacatgccctgctagaggcagatgtggctgctcaccaggaccgaattgatggcgtcaccattcaggcccgccagttccaagatgctggccattttgatgcagaaaacatcaagaagaaacaggaagccctcgtggctcgctatgaggcactcaaggagcccatggttgcccggaagcagaagctggccgattctctgcggttgcagcagctcttccgggatgttgaggatgaggagacgtggattcgagagaaagagcccattgccgcatctaccaacagaggtaaggatttaattggggtccagaatctgctaaagaaacatcaagccttacaagcagaaattgctggacatgaaccacgcatcaaagcagttacacagaaggggaatgccatggtggaggaaggccattttgctgcagaggatgtgaaggccaagcttcacgagctgaaccaaaagtgggaggcactgaaagcaaaagcttcccagcgtcggcaggacctggaggactctctgcaggcccagcagtactttgctgatgctaacgaggctgaatcctggatgcgggagaaggaacccattgtgggcagcactgactatggcaaggacgaagactctgctgaggctctactgaagaaacacgaagctttgatgtcagatctcagtgcctacggcagcagcatccaggctttgcgagaacaagcacagtcctgccggcaacaagtggcccccacggatgatgagactgggaaggagctggtcttggctctctacgactatcaggagaagagtccccgagaggtcaccatgaagaagggagatatccttaccttactcaacagcaccaacaaggattggtggaaagtggaagtgaacgatcgtcagggttttgtgccggctgcgtacgtgaagaaattggaccccgcccagtcagcctcccgggagaatctcctggaggagcaaggcagcatagcactgcggcaggagcagattgacaatcagacacgcataactaaggaggccggcagtgtatctctgcgtatgaagcaggtggaagaactatatcattctctgctggaactgggtgagaagcgtaaaggcatgttggagaagagttgcaagaagtttatgttgttccgtgaagcgaatgaactacagcaatggatcaatgagaaggaagccgctctgacaagtgaggaggtcggagcagacttggagcaggttgaggtgctccagaagaagtttgatgacttccagaaggacctgaaggccaatgagtcacggttgaaggacattaacaaggtagctgaagacctggagtctgaaggtcttatggcagaggaggtgcaggctgtgcaacaacaggaagtgtatggcatgatgcccagggatgaaactgattccaagacagcctccccgtggaagtctgctcgtctgatggttcacaccgtggccacctttaattccatcaaggagctgaatgagcgctggcggtccctacagcagctggccgaggaacggagccagctcttgggcagcgcccatgaagtacagaggttccacagagatgctgatgaaaccaaagaatggattgaagagaagaatcaagctctaaacacagacaattatggacatgatctcgccagtgtccaggccctgcaacgcaagcatgagggcttcgagagggaccttgcggctctcggtgacaaggtaaactcccttggtgaaacagcagagcgcctgacccagtcccatcccgagtcagcagaagacctgcaggaaaagtgcacagagttaaaccaggcctggagcagcctggggaaacgtgcagatcagcgcaaggcaaagttgggtgactcccacgacctgcagcgcttccttagcgatttccgggacctcatgtcttggatcaatggaatacgggggttggtgtcctcagatgagctagccaaggatgtcaccggagctgaggcattgctggagcgacaccaggaacaccggacagaaatcgatgccagggctggcactttccaggcatttgagcagtttggacagcagctgttggctcacggacactatgccagccctgagatcaagcagaaacttgatattcttgaccaggagcgtgcagacctggagaaggcctgggttcagcgcaggatgatgctggatcagtgccttgaactgcagctgttccatcgggactgtgagcaagctgagaactggatggctgcccgggaggccttcttgaataccgaagacaaaggagactcactggacagcgtagaggctctgatcaaaaaacatgaagactttgacaaagcgattaacgtccaggaagagaagattgctgctctgcaggcctttgccgaccagctcatcgctgccggccattatgccaagggagacatttctagccggcgcaatgaggtcttggacaggtggcgacgtctgaaagcccagatgattgagaaaaggtcaaagctaggagaatctcaaaccctccaacagttcagccgggatgtggatgagattgaggcttggatcagtgaaaaattgcaaacagcgagtgatgagtcgtacaaggatcccaccaacatccagagcaagcaccagaagcaccaggcttttgaagcagagctgcatgccaacgctgaccggatccgtggggttatcgacatgggcaactccctcattgaacgtggagcctgtgccggcaatgaggatgctgtcaaggcccgcctggctgccttagctgaccagtggcaattcttggtgcaaaagtcagcggaaaagagccagaaactgaaagaagccaacaagcagcagaacttcaacacagggatcaaggacattgcattctggctgtctgaggtggaggccctgctggcatccgaagattatggcaaagacctggcttctgtgaacaacctgctgaaaaagcatcaactgctggaagcagatatatctgcccatgaggatcgcctgaaggacctgaacagccaggcagacagcctgatgaccagcagtgccttcgacacctcccaagtaaaggacaagagggacaccatcaacgggcgcttccagaagatcaagagcatggcggcctcccggcgagccaagctgaatgaatcccatcgcctgcaccagttcttccgggacatggatgacgaggagtcctggatcaaggagaagaagctgctggtgggctcagaggactacggccgggacctaactggcgtgcagaacctgaggaagaagcacaagcggctggaagcagaactggctgcgcatgagccggctattcagggtgtcctggacactggcaagaagctgtccgatgacaacaccatcgggaaagaggagatccagcagcggctggcgcagtttgtggagcactggaaagagctgaagcagctggcagctgcccggggtcagcggctggaagagtccttggaatatcagcagtttgtagccaatgtggaagaggaagaagcctggatcaatgagaaaatgaccctggtggccagcgaagattatggcgacactcttgccgccatccagggcttactgaagaaacatgaagcttttgagacagccttcaccgtccacaaggatcgcgtgaatgatgtctgcaccaatggacaagacctcattaagaagaacaatcaccatgaggagaacatctcttcaaagatgaagggcctgaacgggaaagtgtcagacctggagaaagctgcagcccagagaaaggcgaacgtggatgagaactcggccttccttcagttcaactggaaggcggacgtggtggagtcctggatcggtgaaaaggagaacagcttgaagacagatgattatggccgagacctgtcttctgtgcagacgctcctcaccaaacaggaaacttttgacgctgggctgcaggccttccagcaggaaggcattgccaacatcactgccctcaaagatcagcttctcgccgccaaacacgttcagtccaaggccatcgaggcccggcacgcctccctcatgaagaggtggagccagcttctggccaactcagccgcccgcaagaagaagcttctggaggctcagagtcacttccgcaaggtggaggacctcttcctgaccttcgccaaaaaggcttctgccttcaacagctggtttgaaaatgcagaggaggacttaacagaccccgtgcgctgcaactccttggaagaaatcaaagctttgcgcgaggcccacgacgccttccgctcctccctcagctctgcccaggctgacttcaaccagctggccgagctggaccgccagatcaagagcttccgcgtagcctccaacccctacacctggtttaccatggaggccctggaggagacctggaggaacctacagaaaatcatcaaggagagggagctggagctgcagaaggaacagcggcggcaggaggagaacgacaagctgcgccaggagtttgcccagcacgccaacgccttccaccagtggatccaagagaccaggacatacctcctcgatgggtcctgtatggtggaagagtcggggaccctcgaatcccagcttgaagctaccaaacgcaagcaccaggaaatccgagccatgagaagtcagctcaaaaagatcgaggacctgggggccgccatggaggaggccctcatcctggacaacaagtacacggagcacagcaccgtgggcctcgcccagcagtgggaccagctggaccagctgggcatgcgcatgcagcacaacctggagcagcagatccaggccaggaacacaacaggtgtgactgaggaggccctcaaagaattcagcatgatgtttaaacactttgacaaggacaagtctggcaggctgaaccatcaggatggcaaatcttgcctgcgctccctgggctatgacctgcccatggtggaggaaggggaacctgaccctgagttcgaggcaatcctggacacggtggatccgaacagagatggccatgtctccttgcaagaatacatggctttcatgatcagccgcgaaactgagaacgtcaagtccagcgaggagattgagagcgccttccgggccctcagctcagagggaaagccttacgtgaccaaggaggagctctaccagaacctgacccgggaacaagccgactactgcgtctcccacatgaagcccatcgtggacggcaagggccgcgagctccccaccgcgttcgactacgtggagttcacccgctcgcttttcgtgaactgagccactccctgggtcacccacccctcgctgcttgccctgcgtcgccttgctgcatgtccgctcctctgtgtgctctcactttccactgtaaccttaagcctgcttagcttggaataagacttaggagaaaatggtgcttcactaacccgcttccggtccagtcacaatcatcatgtcactgtgggacccagatctgtgtcttgaagcagctgccctcattccgacttcagaaaatcgaagcagctggcgcctccccttcggaattc

SEQ ID NO: 2007 - DNA, 359 bp, Homo sapiens
  misc_feature: n=a,t,g or c
gatctgttatnaaacgaaacaccccccgtgttaataacttggtatgaaatctgtttttatgagccgggccccctgtgcctctagtatacttgtattgactctcatagttacccttttagttttactgtgttctgtgaaaatttgtaattggttgngaatcactgtgggcgtccattcttattcaactaaatctccacaggttttttgagctggtgtggattagtttaactcttgtattcaaccattagtgctaccaccttctcacattacaatacanttnctggaagcaagtactgcatttcctatgcaacaaaaaaagggcaaaantacananattgctaaatgataaacaaanactt

SEQ ID NO: 2008 - DNA, 283 bp, Homo sapiens
aagttttccacaaacgtttatgtacacgccaatgtatgcatgagacatctttcaattaaaaatgtttaaactgatttttttttaaataccactataccaatgaggataagctgattttttaacttagattttatagctctagttttgcagttttggaaaatagcaggttttaaacaaaattaatatatgagctatttaaaatggtctttttagagtaagtcttacacataatggtcatttgctacttggattttcttgtccaattaatagtgacatttgacat

SEQ ID NO: 2009 - DNA, 437 bp, Homo sapiens
  misc_feature: n=a,t,g or c
aacaganttgaaatgtttggatttattgtagcattactatcaggaatacacattgattatggtattgctatcaagaatacatataaatacatgcctgaagctataagtgagataagagatattccagggttagtcaaaagttaatctttgagttccagaagtctggatgaaaatgagatgagactgcaaattttgttgttaggcagtcaccatttatgacccttggcagggagggcaggaatggtggttatattgtgaactgaatgaaaactgaggaactaatcagcatcatgtggggcctgaagcatttattgctacccagtgattaggttgtaaggcccttcgggacttatggtaacctggttaatggacctattacgttgcccgaattccctgcagccccgggggggtcccncctaggtttcttggagcggccc

SEQ ID NO: 2010 - DNA, 327 bp, Homo sapiens
  misc_feature: n=a,t,g or c
cagggtttggctttttattgacacaaatacacataggcagntnttggtaatggggaggtggggtacacaaaagcagaaatcgcacttcacacatttaggnctcanttagacaatgaggaggctgagcctgtccctccaccgcccattgcaatggttnnggcaataaccctccctaatcctggctcagtgagtagagggagtgaccggcccacccaggaggtcccccctttggttgcaatggcccaggtcctgaccatcccactctgtagtnccctgntccatctaccccacccatgtaaacagagttttgggctgcgttgtgataag

SEQ ID NO: 2011 - DNA, 632 bp, Homo sapiens
gtcccagggcggcctgaaggatgctgataaccgggagccccgccctgggttcggctatcccgggcaccccgggccggcggggcgaggctctccaattgctgggccagagcgggacccttcctttccgcaccctcctgggtatctccggtcttcaggcctccttcggagagccctgctccgagcccattgggcttccaatcttggcctgcctagcgccgagcagccaatcagaaggcagtcctcccgagggggcgggacgagggggtggtgctgattggctgagcctgaagtcgccacggactcggggcaacaggcagatttgcctgctgagggtggagacccacgagccgaggcctcctgcagtgttctgcacagcaaaccgcacgctatggctgacagccgggatcccgccagcgaccagatgcagcactggaaggagcagcgggccgcgcaggtacactctgtgctccccgagcgggcccgaaggtccgtttagaaagcgggggcgtcggcaagtaaaggcccggcttctcccggggcggcgcttggagggactgtaccgcggctcactgggcaggggggatccccttcggtgcagacggacttttacattcgccgaagcaggggagggg

SEQ ID NO: 2012 - DNA, 333 bp, Homo sapiens
cctgcatgtactgtatattacagatatttgtcatgctgggatttccaactcgaatctgtgtgaactttcattccttcagatttggcttgacaaaggcaggaggtacaaaagaagggctggtattgttctcacactggtctgctgtcgctctcagttctcgataggtcagagcagaggtggaaaacagcatgtacggattttcagttacttaatcaaactcaaatgtgagtgttttatcttttacctttcatacactagccttggcctcttcctcagccatagtgcatagctactaaatcagtgacctcgacatatcttagatgggagctcgga

SEQ ID NO: 2013 - DNA, 453 bp, Homo sapiens
gtcaaatctcatctctgttctcctagttttcacagaaatatttacaggaataaaggttgaaacaaaagtacctaatgatcatctccatccatcgaaagattgctcagggataagacactcaaacaagggcttgtgatgaggatggaaaagacaaagcaacttgaagagaaaaaaaaattcttttaaactcagttcatcctgcaaaatggacataacacatgcatataaaggtttgactttttaattccacttttttgcctgatcgcagggaagatggcatgtggctggccttcctgaagccttgctcctccaccactggctaacagacaggcctccaggtggccttgcaaggccgacagtgaccgcagcccattccccacatccttaatcagagcctcatgcagttcatccccacattaccccaacataacgtcgtagtgctacacgtagatg

SEQ ID NO: 2014 - DNA, 252 bp, Homo sapiens; identical to SEQ ID NO: 882

SEQ ID NO: 2015 - DNA, 487 bp, Homo sapiens
tctcatggccagaattgaaaattttctcatccagaaatttagggcacccaattattgaatacccttatcatattgctttaaatgacagaaagattaaagctggcatcctctatagtatactaagcatgaatgtaaagtatgagaataaataggagactttcctaaatgtcaaattacaaaaccgctcaaaactttgtaattgtgactcatgcaaataccttgttaggtcaacttaatattacaaatactgcatcagctcggtgcctttatatcccttttcataaaaaagaaattctcactccactcctgaagccagcaaacagctctggaggaattacctgtacacccaagtgccacggtcactctggaattttaatacacacacacacacacccttactcatgaacatacacattttacaaacacacaatggtgtacacacacacacacacacatccacacacaccccatctttaggatttgtagc

SEQ ID NO: 2016 - DNA, 280 bp, Homo sapiens
ttttgccactgtaatcaaatcaatattttattcatacaggagtagaaaagtagaagacatgaacagaaataaaaattctgaccaaatcttaaggagtgtgaatgagaactgaatgtatgataaatgttgcatgttcagttcaatgggaaattgatcgcttatttaataagtgattgtggcacaaaggctgtcttcagcaaacaccaaataactctgtgctctgctttgagacacttttctgaatctgttagcaagagaaatgctgaagctttctcagatg

SEQ ID NO: 2017 - DNA, 209 bp, Homo sapiens; identical to SEQ ID NO: 470
  misc_feature: n=a,t,g or c

SEQ ID NO: 2018 - DNA, 343 bp, Homo sapiens
aaatttataaggcaaactctttatataataaataggttacagggattcagtggggggggggtgtttttgaaacgtatacaggtacattcagacaggtttactgaaatggtacaaatttccttaataaattgccttttgtttttaaatatatcagtgctttcagtcatttggctatacacaaagaaccttttttctgaacactacaaaaaagcaatcaataatttttgtttttaaaacgacctacttattttctaaagtaattgtcccaaaacacaaaaactgaaggtgaatacgatacagggcttttagagacatctccagctaagtgtgtcccggcctctcc

SEQ ID NO: 2019 - DNA, 378 bp, Homo sapiens
  misc_feature: n=a,t,g or c
gtattttgctttattcaatctaataaacattttatttatgtaaaagacaaacaatgcatagaataaaaataagtgcttgagacttttgatataaaaagagtatatagcattcacattcctattttaatacatgagtacagctgaagtgttccataaangaataaaactttccctttatgtatagtagtgaaaaaagtcagtatttttaggaactacagaatgttattccttggtcttttttctngaataagaaaaaaaaaacataaacaaaacangccacagtatcctcngacactacattccaggtttatgcnggataacccagaagtgagaatactccnggaatctngggtatcncatgaatgggaccagnattcc

SEQ ID NO: 2020 - DNA, 452 bp, Homo sapiens
tgagacaaccagatgctgtaaaaaaaaaaacagcactgggatgtgttgaggagggggcagtttgctgtgctctgttctgtctgctgctctctctgggggccgcacaatgtccgcacacatcacggaggggagaaaggcatcagtaccaaacggaacaacctcttttttctacattgtccatacccggacatgtgaggctctattatcaacaggtggtgagaaaaattctgtttttattcgctttctggtaacttctgtaggccctggctcaaggacttagcatttcgtctcatgtacatctttttctgaagtgttctttgccatttctggaattgtccttggtttttccttagctcataggtcatagatgcagaaatatagtatttaaggcatccgcatccagcatcagatggctttgcatccagaaaaacattgataactcagtttgaagc

SEQ ID NO: 2021 - DNA, 418 bp, Homo sapiens
gttgtgttttttttgttttgtaaagctgcagcaatagatttattgcaaaggaactagacattacattaacctgatgaagatgtaacgatgcatgaagcataactggtgcaacattttttaaaaatcacaaatgaaaaagaaaattcattttcaaaagaaaatattgtatccaagtcagcttaatctctgaacaccataatataactcttaatgttgattctaaacatccaggataaagtttactttaaactgaataaaagaaagaaaaggtttctttccaaacttccccaacagattccttggctaccatcggtgcatcacacccataaagtaattgtcatcaacagaccgtaaaaagaaaaaaacccctcctacaaatagagaaattctcaggaaatccaagcaacaaatcaattag

SEQ ID NO: 2022 - DNA, 447 bp, Homo sapiens
tttttttttttcttttttttttctttttagtgtgtattaaaatgaatttatttacacagtaacatgatgccacggagtacacagcaaagtaccacagcaaaccaaagggtggcaccactgctggcagagaggacctttcaatgatagatttatacaactttacaatatgtaagtagaggggtgaagctccggaaagagcaaaaacaagattttcaaatacagagtgtgggcagggcagagagaattaaagagagattggaatgaggactgtcatgattcaaatcaccaagtagaatgaaatcttgcttctgtatttgcctcatgccaaaatgccctgcatatcctcaacagaaaatcccaacccagtgtgttcatacatcacactctttagttctaactggtaaaggaagggataaccaagtagtatttggagcaagttcctgaaac

SEQ ID NO: 2023 - DNA, 216 bp, Homo sapiens
tttttcatactcagtaagtgtttaatgaagaagagacagatggaaagagatgggcgaggaaggctgatgttacaaatataaactttgtcagcactttcaaaacaatagcaaatacacttaaatacatacaaagtttattaaaaataggttgcaactgaaatacagtagaaatggaaaactacagcagttttgatgttttctcatagtaatgcagtt

SEQ ID NO: 2024 - DNA, 439 bp, Homo sapiens
  misc_feature: n=a,t,g or c
ncattannctttatntcctgtactgtgaagtgtgttgaaatgtggaagttatttcacaaagttaacagggtcttcaagacagaagagatatacgtgcagagtacacacatacacctacgtacacacctgtatatgtcgatgacgacagcatggagggaatgaacttgtgcatggagaagggggctttttttaaacttgaaagaaaccagcccattctgtgtgtgtttggaggaggggagcctgtaaagcctatttaccttgaatcccctctggcttacagctgcagagagcaaaggagagcagacatattctaggattggggcagtggggatgatgggtgattgcgttgctgctcaacgagtctggggtttgcagggtccaagggtaatgaccctttcccctgaggggccctcattcaaaggggctgagggttgcaagc

SEQ ID NO: 2025 - DNA, 367 bp, Homo sapiens
  misc_feature: n=a,t,g or c
ttttgatttaagaaatttattattttttttaaaaaagcaacttccagggttgtcattgtacaggttttgcccagtctcctatagcatggtattatgatcaggatattgaggacttgaatacgttgcactttataacaaacagacaaccagaaaaaagagttgatttaagaaatttattatttttttaaaaaaagcaacttccagggttgtcattgtacaggttttgcccagtctcctatagcatggtatagtgataactgattttttatnacaatgacccagaggcattgaagatccataactatcttcctgaattatcacagaaagaagaaagttagaagagtttaatggttaagtggtattaaaa

SEQ ID NO: 2026 - DNA, 234 bp, Homo sapiens
  misc_feature: n=a,t,g or c
cttattcaaaacaatattatttaatttaatattttcacctatgagaggtaatgaatgcagaaatatagtctccattatagcagacaggaaaaaatacattatcctactattttctagaaaaatgattgtggcattagcaaatcaaatggaaaaagtgaataagcagnctgngattacctgaaaatagttagttgctagtaaggttcagtacaatgtatgtttattaaataatcg

SEQ ID NO: 2027 - DNA, 426 bp, Homo sapiens
  misc_feature: n=a,t,g or c
gaggcaattatcaattgactttatttcctttcatatggtaacaccagcagtgtatgatatttgtaaataaaatacgtcataaaaaaatttaaccttattacctattatcagttaggttataccatcctgaataaaaaatatttgggccgggcatggtggctcacgcctgtaatcccagcactttgggagaccgaggggggcgattcacgaggtcaggagattgagaccttcctggctaacacggtgaaaccccgtctctactaaaaatacaaaaacaaaattagccaggcgtggtggcaggtacctgtagtcccagctgcttgggaagctgaggtgggagaatggcgtgaacccaggaggcggacttngcagtgagctgagattgtgccactgcactccagcctgggcaacagagcaagactccgg

SEQ ID NO: 2028 - DNA, 244 bp, Homo sapiens
atcttgatattgtttattgtttacggttatgacacattatatatatacacacacacacatatgtatatagttacgtacacacacaccaatggcactgattttggtacacatcagaattacttaagagagtttgttaaaaatggagattctggagccccactctgtgagtctggacgataggtcctacatttttaaatgcccctgcctgcccccaaggtgtttttatacagatggtagactcact

SEQ ID NO: 2029 - DNA, 399 bp, Homo sapiens
  misc_feature: n=a,t,g or c
ttttttaaaggtttgaacatcaaattttaatcttgaaaccttttatccagtcctcaaattattaacatgaaaaggagtgataaattgcaattttatcattaccatatcactgngtaacaagcccttgttacaaaatctccctctactgtctgcaaaaaaccaatagaaaacccatacattatattacctaatgntctattaacagatgaaattttaaccaactttataccaggaaactatgaacagaggtacttcaatcacatagcttaaaatatggagaaaagacaggtaaaaaaattatcttaacctgtagtagtcttttttctttttaaaatttttataaaatacactaatttcccaaaataaagantattatgncacattggngtaacttacacn

SEQ ID NO: 2030 - DNA, 6431 bp, Homo sapiens
  misc_feature: n=a,t,g or c
aactgaattggcaaactagataccttcttgggttatggtatattagagaaacacgaaaactactggcatttggactttcttagaattttgtggctcattaaaaattgtatctggctcagtgtgatggagggttgggaccgggcagggtcttgctctgtcacccaggctggagtgcagtggtgcagtcatggctcgctgcagcctcgacttcccagctcaaacagttctgcatcagtctcccgagtagctgggactacaggcacacactaccatgcccggctaattttttttttaattttgtattttgtagagagggggtctcactatgtttgttgtccaggcttacgtgtgagttttaaataaaccatttctttttctttcagatttccacaagacggcaccctatgtcgtcactggcagcgtagatcaaacagtaaaagtgtgggagtgccgttgattgtgtctccttcggcccctcctccctcttttcctctggatgcactctgatgataccatggttaccccattgagctctgtttaaataaatattgtcctttcatgtaaattattctggatgtagattgagcttattaaatgttacacacaaagtattcatgcatggtgaatccaaattgtatactgtaaatttacatacgttgtctagaagtaccatagggtttaaaaacctgggctggcattggtcacaccaggcctaagaaggcagaagttgaatcaattgaactagggcactaaactgaatagttgacagtgtcattttatgttggattattaattcctgtttttctttctgctatctgttggtgcctgacttgatggcctcatttggggaaaagtggtggttattagggcttttcctgaaatgtgtatctatgtaacatcacttaagtgtgcttaataaatctcctgtaaggattttagatgataaggctacaattcagaatcttctgaaccatctatgtaatgaatggggattatacattggaatttttgtcatgacacatttgccaaatcagtaggatatatttgttttggcagcctatcacgcagaggctagtggtatatttatgtaagaaaatgactgtaaatctcaagaaaaatctcagcagctaatagcaactcatttatttcattttggtcttaatgctttgtaaacaggtcaaaaaatactgtcatactctaagcttctattttccacactggacatacttctagttgtattctccatactattagactgtgtagtgatgtgacttccaagtagaatttaatctccccattgagtgtgtcatggtacaaatcactattcgtttttggtgttttttagggatgtgcaatgtgcattacataatgacagaaatactgagaaggttctgtgtgcccatttgaaaggagtgggaggaatacagcagtttgtttttcaacatgaatctgatattgatttaaactgtgtttcacttacaagttttaaaaaaatgacagggtttaatggagcgtgcataaaaatgtactgttttcaccttttgtttatatgtaaatgtttgtaagtatatgggcctatctgtaagtgggtaagtctgtatgtgtgtatcatacacatcaacctccatgtccttagtcctgggtttttgaaaaagtgctaaaacggacaagtagaataaatgttgctgtggaatgccatgctttagaacaaaccctttttgatcttaatgcttctgaaaactaggtctgactctggggatttttttccagccgaaggaaaatcacttccgttatgtccccctctaatttagccgctcgacattttacacaacccggatatgttgtatattttgacccaaagttacaggtaggtttaagagaatttttagccatgacttttggagcactattccattgtcagttattaataaagaattccattgcttagctaaccaacaggttttttttgtttccaagagagttatttgaaaagttaacagaacaatgagataacagtgacagtttaacaaagataaaattctgaactgcgttttattcatttgtgtactatgtgattttttaaatgtcccctttagtatttaatggaaaattggttcctgcaaaagacaaagggtgagagttagcgtcctgtagatacacacagagactaggccgtatattaactagaagcagctttatgtctagcttgtgtctttttgtttgtttgcttgtttgtttttagattcctgagagatgtctctggaagggaaagttttgagaactaatggctatttttgaggacaaaaattacatcttaagctaattccttaaatacatacagtaggtgaattttcaggacaatattgcctcacaaccctgcttacattgaaaagtctttttcccttagctcttctgactggatttttctacaaaactatggaaaatatctttgttcttgtttgctgctattttctgtcctattttgagaaatataaatacatagaaatggtgcatcttaacatttgtttgtacatgtataaatgtcttgtattttaattcatttttagcatgaattgtttaagggtaagccacaacatctagaaatcactcatagatattgaacaataaaggagaatggtaccgatgcaggaggaagcaagcgtgtcttcccctgcagcacacagcgacttgcgttgacaaaggaggaggaaacgattactctgtaaacaaagttatccttacttgggagattgccacagcctgctgctgagttgagttaccagacatcctccatgtgagaagcagcgaacattgaatctcagggatggcccacaactgggtccacatgtaatgagccctgtttaataacgaaggggtgggggagagcagtccgtctacaacctggaatcagatttgcaaaatttcctgcactgctgtctgacactgtcctgttgatgccctttctgactgtgttctctgttttctctgtctgctgtctaaccctgtgccttgcctgggataaggacaatgatgaggttactggtttggattgtaagtagaggacttttattaattggtttagaggttcactgctgctttgtcactttctcaatcaaattggccacttaagaaataaagagctggtagaattgcatcctcagatgattattgactgtgtgtgtgtgtgaaaacagacattccagtgccacccaaatatatatctgtaacgtgcccaagaaatcctagctgcgctcttgagagtgcatgccatggagactggtttagacaccgcgtggagcctagttgcctgttgtcacggcatcttgcactttaggagactaagaccgtcctggttcgtctgtgtgtggtgtgaccaatggtgtgcccagagcactactctcaaaatcactagtgttagcaagtcgtcccgggctggggagcgttcgccgtagtctttggaagctttggctttagatttaccaagccccgcctccccgctgccagtgccctgctctcccgttcgcctctttctgtttctgtgtgaactttcccggtaatatcactcgttaaataggttttctttaaacttaattaaggaaaaactatttaaaggtaaaggatattttgttgacatcggtggctcgatcatccttaagcaactgaagttaaaattgttgaaggaaaaggcacttaaattggttactttcatgtccagctgtatataagtccagtgtgttcatctagatgacgcaaagaatctcctggtagagaagcgacatgtaaaaaactggtggaaaaaggttttggattttttttccagtggggtggggggagggcaagctggatttacaggtcacggctggactgaatgggcctttttatcttcccactgtatcatggaagtagctgcttgcttgtactgtccatccttcaggcatccctaaagctcactctgaagatgttagagacaaacacaaactcttcgagttaaagttgatcctgacactgacatgaaggcaagccttgatttcgtatgaacgttgctgaatggtaattgaggaaaacagttccccagattgttaagagttcactgaagatattgacacaattttaaaaaatcagtaaaggaatgtatataatattgctctcgtgttttacagtaagatttgttgctctcagactgtgtaaaacaaaatttattcatgttttctgcatattaaaaaatcttattgtaccaactggtaaactattaaatgcctataaaactagatgtgattttttttttttttttttttttttttttttttttgtcttcctttgcacaggggaaatgctgataaaaagtggggctgtgtgtagctccagtcacaaagagtgacacnaatcggtgtcagggcagtaaggcctcatgagctgctttccttcagggcagcacccgaactggctttgctgtcccccttcccccgggtggaggagggagtgcctcagcctgagccttgccatggcatgcgtctgcggcacaggcccgctctccccaaccctcccagcagcccgttctgactgtggctatcgctgtggccagagagccaaagccaggatggctggttacaggcccaagactagactcttggggacagagtctatagataaggggccctgccgggcgcggtggctcacgcctgtaatcccagctcttggggaggcagagacgggaggatagcttgagcccaggagttcgggacctccctgggcaatatagcgagaccccgttctccacaaaaaggaaaaaaaaaagatggggccctaccccctttgttctgttagcctctaatcttgctcagtggtcttggaatcataaaagtaaatccttaatactgttttcgattttggttgaaacatacaaaataagagtgttcatctttgtcccagaaaccccagctctgcactttacacatggctgtatctgtggtgtattcaaggtgccctacaaaggacagtttggtgatgtgctggttcctttcttacagcccagctgttttcctgcctcctattgggagtagtagcctgccccaaaataggagcttggcccagagcaaaaaaggaatgggccatgcgcagtggtacgcctgcaatcccagcaatttgggaggccgagacgggcagattgcctgagctcaggagtttgacaccagcctggacaatacagtgaaaccccgtctctactaaaaatacaaaaaaaattagccaggcgtggtagcaggtgcctgtagtcccagctacttgggaggctgaggcaggagaaacacttgaacctgggaggcggaggttgcactgggccangattgcaccactgcactccagcctgggcaatgaagcaagaccctggctcaaaaaagcaagaaaaaacaaagaaattggcctgaagttagttccctgcacttttgcagcttttccatttccttgcaagactcttccaggctgagatccagatgatagggccccaggggcagagttctagcgttagtatcactatctcagaaatgctgttagctgttcaaaacctggcaagtaactcgctggcttgtaactgcctcaaacctccttccaggagtcatgactgtgtatggcctttgatgcagggggagggtagctggctgtggcagctctgtccctgcctagcctggtgaaacctgacttgtgtgcagacggttcttaactgctgatacaccagaagctctaggacaggcatcctcaaagtgtgttccctggttcagcagagcagcagcacctgggagctcacgcctcagaacccctgagtggaagcggtgcagcctgcttgcttgcttgattcacaatctattataacaagcccttccaatgactgaggcaggctcaggttcgagaaccaccgagctaaatgattcaacttctcaccaaagaaacttgggcacatcactggtctcttggccccgcagctcaggtctggatcccgatctttcctctttcatccttttatttatttttattttttgagacagagtgtcactctgtcatccaggcttgagtgcagtgggatgatctcagctcactgcaatctcttcctcccaggttcaagcaattcttctgcctcagcctcccaagtggctgggattacaggcgcgtgccaccgtgcccggctaatttttgtatttttagtaaaaacagggtttcactatgttggccaggctggtcttgaactcctgaccttgtgatctgcccgcctcggcctcccaaagtgctgggattacatgtgtgagccaccgcgcccggcctatcctcactttgaacatgtggagtttgtccctttgtgacaatgtcctatgatcttcattcccacttggtcacctgaccttgactgactctgtctcaaaaataaaataatggcttactcc

SEQ ID NO: 2031 - DNA, 4778 bp, Homo sapiens
ggatcctccagcctgagtgctcttggggaaacatgctgtgtaaacactatgcccatttcctgcctggagcacaggttttgtggtagggctctcaggggtgaggaggaagcctggcagcccccacatctataaatgctgcgtctaccttaccctctgacttggaggcagagacccaagcagctggaggctctgtgtgtgggtgagtttagccccatcccctaggtgttctccagcttgaggatcgcaggcagagaggaccagcccagcagccacaggcctgaccaaagcccaggctgggaaggagggcaactccccattttccactgggaggtgtttcacagcacagtcaacataggtgacctgcaaagatcctcatgtttgttattttctttggccagatccatcctacagggttcagcagggcctacaggaggggcagtgagagaacagaccccaaaaagaaaggggactccatgactgaccaccttgaggggggccaggctgccgggccccgttcatcttttttcattctcaggtcgctgatttcttggagcctgaaaagaaagtaacacagcagggatgaggacagatggtgtgagtcagtgagtgagtgacctgactaatagcctgggagggacagggcaggttttctgcagaggcacggaagattcagctgaagtcagagaggtgaagccagtttcccagggtaacatagtgaggcactgaaagaaaggagactgcactggagcccaggtccccgggctccccagagctccttactcttcctcctcctcagcagcctggagaccccacaacctccagccggaggcctgaagcatgaggccatgccaggtgccaggtgatgctgggaattttcccgggagcttcgggtcttcccagcactctggtcgtcgcccgccctgcctcgtcgggctctgcccagcttcctgagtcctgacagagcacagtgggggagatgttggcagaggtggcagatgggctcacggccatccctcctgcaggagcagcgactggacccagagccatgtggctgtgccctctggccctcaacctcatcttgatggcagcctctggtgctgtgtgcgaagtgaaggacgtttgtgttggaagccctggtatccccggcactcctggatcccacggcctgccaggcaggcacgggagagatggtctcaaaggagacctgggccctccaggtactgtgctgcagaccccaccctcagctgaggacacagaccccttttcaggaggcccatctgtccaggcccctaggctgtgggccatagtgagctgggggctatagtaagctgggtgggacttcagtctgcagggctggtgggttcctggggcccttatgatggcgcatcctggagagtctgtcctcatagtgcccacggagtgatagagtgatagctgagccagccctggtgataatgggcatcgagtctcactagctccaaccagttgtgggtgacagatcctacacatccatgtctcttttctctgcaggccccatgggtccacctggagaaatgccatgtcctcctggaaatgatgggctgcctggagcccctggtatccctggagagtgtggagagaagggggagcctggcgagaggggccctccaggtgagcagggtggggcaggtgggcagtggaaacatgggcacagcgaccctgaagtcagttacacggggatgatggggatcagacaaaccctacaggttccccaagggcatttggctcaacctaagtaagagaggataagcttgagggagatagctgaggtgtctggggagtgtggtcacaattcagggaaaggcaggtgtgggaagtcctccgtgcctcatgaccaccgatggggacacactgagtcaggtgtgggatgagggacagcactgggaggcaggggaggcatgtcctgggatggaggccctggggctgtctgaagggtgaatgcggacgaggcatccagacagacggtgtgatcaggagccccacagacagaggggaactttgaagctcagagcggtaagcaagtccatcagggcagtgcagagagcatcatgcttgcccttcggtcggagggtgcgggagagggacttgccccacagaggcgggcagacagaacccctcgaggacaagagcaggaaagaggacaaggggtgggggtctcagcaggggcaaggcttcactaaagaataggggaccacgggtctgagacacactggaatcttgtggaccctctgagcctaggtctggtggcgcctaacagcaatgaaagggcagagttccaggattgcagatggcaaaacacctcgtggcagcaagtgggagtcttcactggcctgcccctccttctgtgtggggcactctccacagggcttcgagctcatctagatgaggagctccaagccacactccacgactttagacatcaaatcctgcagacaaggggaggtaaggggaccccctgggctcacggggtaggagtttcccacaaattcccctcattctcagcaccagcttctagaacatagagattacaaataggcatgcacatgcaggtcttggggaaaggaattgacgcttgcttttcttgatgtcttttgaatggcccagaggagacagaagcagacacaattcacttccccgatttcataggaaagcaagttctctatctgccttgctttccactgaattcacaggaaattgcaccatttctggcaataagtaattgttacttaggtgaatgaataaatggaggagagtctaaaagtgaatttagaaaactgcaattggaagaggaagagaagacacagagagaggcagagatggagagactggggagaatctggtagcagagaccccaggtgagggaggtggcttagagacaaagtggtcagtggcctgacccggactcctctgctctcagccctcagtctgcagggctccataatgacagtaggagagaaggtcttctccagcaatgggcagtccatcacttttgatgccattcaggaggcatgtgccagagcaggcggccgcattgctgtcccaaggaatccagaggaaaatgaggccattgcaagcttcgtgaagaagtacaacacatatgcctatgtaggcctgactgagggtcccagccctggagacttccgctactcagacggcacccctgtaaactacaccaactggtaccgaggggagcccgcaggtcggggaaaagagcagtgtgtggagatgtacacagatgggcagtggaatgacaggaactgcctgtactcccgactgaccatctgtgagttctgagaggcatttaggccatgggacagggaggacgctctccttgtcggcctccatcctgaggctccacttggtctgtgagatgctagaactccctttcaacagaattccacttgtggctattgggactggaggcacccttagccacttcattcctctgatgggccctgactcttccccataatcactcgaccagccttgacactccccttgcaaactctcccagcactgcaccccaggcagccactcttagccttggccttcgacatgagatggagccctccttattccccatctggtccagttccttcacttacagatggcagcagtgaggtcttggggtagaaggaccctccaaagtcacacaaagtgcctgcctcctggtcccctcagctctctctctgcaacccagtgccatcaggatgagcaatcctggccaagcataatgacagagagaggcagacttcggggaagccctgactgtgcagagctaaggacacagtggagattctctggcactctgaggtctctgtggcaggcctggtcaggctctccatgaggttagaaggccaggtagttgttccagcagggtggtggccaagccaaccccatgattgatgtgtacgattcactcctttgagtctttgaatggcaactcagccccctgacctgaagacagccagcctaggcctctaggtgacctagagccgccttcagatgtgacccgagtaactttcaactgatgaacaaatctgcaccctacttcagatttcagtgggcattcacatcacccccacaccactggctctgctttctcctttcattaatccattcacccagatatttcattaaaattatcacgtgccaggtcttaggatatgtcgtggggtgggcaaggtaatcagtgacagttgaagatttttttttcccagagcttatgtcttcatctgtgaaatgggaataagatacttgttgctgtcacagttattaccatccccccagctaccaaaattactaccagaactgttactatacacagaggctattgactgagcacctatcatttgccaagaaccttgacaagcacttctaatacagcatattatgtactattcaatcttcacacaatgtcacgggaccagtattgtttcctcattttttataaggacactgaagcttggaggagttaaatgttttgagtattattccagagagcaagtggcagaggctggatccaaacccatcttcctggacctgaagcttatgcttccagcctcccactcctgagctgaataaagatgatttaagcttaataaatcgtgaatgtgttcacatgagtttccatagctttggttccaagaaatatcacatttctgtatttttgtaaatcaaatgaactctgactctgagccccacttgcctgaagattggaaattcaatctcaggatgtg

SEQ ID NO: 2032 - DNA, 367 bp, Homo sapiens
tttgaggaatgagcaatttatttcaataaagagaaagcattaattttgctacagtgggaaaaaatgaactcaagagttgctacatttaactgtatccccatttatctctgcacgatgtcttatctcagtgtctcaattcacactaaaatattgaatgagaaatacaccacgttggctgattgcttgacatgtctgatttagggagacttctacaaccactcctctcttttttctcccagtaaatacttttgactttgacacctaccatattggaaatgacaggtgcccgagggcaagtgcatcaaagcagttaggattcgaatgcttgctaaggattatttttttaatggagcagttctattgaatc

SEQ ID NO: 2033 - DNA, 360 bp, Homo sapiens
gaggcttaaatgttactttaatagtatccacaaagaatctggtttagttattaaaatgacttatttttatttaaagaaaaaatctgtgattttactcattgtatatatagaagtgaatttttaaaaaatagtttcttcttttatgtggattctcttaagatttgaagaaccaaactattctttggttttattatacgggaaaaacaacacgcagtctagttaaacaactttgtgatatttatattccattgcacagatatgggttatacaaattagtaacacaagttatttcttaaattccaaacattttctaaaatattattacagcagatgcctaggatattaaaacataaaggtgga

SEQ ID NO: 2034 - DNA, 264 bp, Homo sapiens
  misc_feature: n=a,t,g or c
catcattctatttattacatgtatgaatattaacatctcatggtgtccatctaagtcaaaaccaacaaaagaaaaaagttaaccatatctcaagcaaacattcttacagattcccgttacttaaaatagaaatatgttcatctgcattaaatcatttgacaatttgaaaaagtctttaaaaaaaaaatcacctttaggtactttaaatatatttgttaattgttgangggcatcngtgtccagggttcagggattaaaccttgg

SEQ ID NO: 2035 - DNA, 460 bp, Homo sapiens; identical to SEQ ID NO: 459

SEQ ID NO: 2036 - DNA, 455 bp, Homo sapiens
cctttttctaatacttgcttatatcatgtgctgccgacgggaaggcgtggaaaagagaaacatgcaaacaccagacatccaactggtccatcacagtgctattcagaaatctaccaaggagcttcgagacatgtccaagaatagagagatagcatggcccctgtcaacgcttcctgtgttccaccctgtgactggggaaatcatacctcctttacacacagacaactatgatagcacaaacatgccattgatgcaaacgcagcagaacttgccacatcagactcagattccccaacagcagactacaggtaaatggtatccctgaagaaagaaaactgactgaagcaatgaatttataatcagacaatatagcagttacatcacatttcttttctcttccaataatgcatgagcttttctggcatatgttatgcatgttggcagtattaagtgta

SEQ ID NO: 2037 - DNA, 1098 bp, Homo sapiens
gagaagctctatctcccctccaggagcccagctatgaactccttctccacaagcgccttcggtccagttgccttctccctggggctgctcctggtgttgcctgctgccttccctgccccagtacccccaggagaagattccaaagatgtagccgccccacacagacagccactcacctcttcagaacgaattgacaaacaaattcggtacatcctcgacggcatctcagccctgagaaaggagacatgtaacaagagtaacatgtgtgaaagcagcaaagaggcactggcagaaaacaacctgaaccttccaaagatggctgaaaaagatggatgcttccaatctggattcaatgaggagacttgcctggtgaaaatcatcactggtcttttggagtttgaggtatacctagagtacctccagaacagatttgagagtagtgaggaacaagccagagctgtgcagatgagtacaaaagtcctgatccagttcctgcagaaaaaggcaaagaatctagatgcaataaccacccctgacccaaccacaaatgccagcctgctgacgaagctgcaggcacagaaccagtggctgcaggacatgacaactcatctcattctgcgcagctttaaggagttcctgcagtccagcctgagggctcttcggcaaatgtagcatgggcacctcagattgttgttgttaatgggcattccttcttctggtcagaaacctgtccactgggcacagaacttatgttgttctctatggagaactaaaagtatgagcgttaggacactattttaattatttttaatttattaatatttaaatatgtgaagctgagttaatttatgtaagtcatatttatattttaagaagtaccacttgaaacattttatgtattagttttgaaataataatggaaagtggctatgcagtttgaatatcctttgtttcagagccagatcatttcttggaaagtgtaggcttacctcaaataaatggctaacttatacatatttttaaagaaatatttatattgtatttatataatgtataaatggtttttataccaataaatggcattttaaaaaattcagc

SEQ ID NO: 2038 - DNA, 402 bp, Homo sapiens
tttttttttttttttttttttttctttaaagcactttattaatgaaagttggaaacctaaaaattgaacagtagtttaataaaatgtggcacatatgatggaatatcatgcagccattaagagatgtagaaatatacttgacacagcaagacagtcatggtattgttgagtgaaaaaaagttacaaaacagtatgtacactttgatcccattaaaaatatctataaatgcacagaaaagtctggaaggccatatacttaaataacagtggttctccctggatgatggaattatcagtgatttttctttctcactgaatcttttttctttttgccaacagggctatgacttgtattataaaaaagcattaacaattctttaaaaagtgtcctttgaagtaaga

SEQ ID NO: 2039 - DNA, 376 bp, Homo sapiens
ttttacttgatcattctttttatttttacaaagcatggcaaaatgaggaaaccactgacaggtgaagaatttgcacaatggaaaaccaccttgaccatctcatgactttatacaggaatcggaggtaagtgttcctttaaagtgattttgtcatgaaagagtcatctgaaatgactctcgtgatggaggaaaggaaagtaatgaaatcaacattcatggttatttaaaatgccttaaaagctaagcataatatacatagtaactccttttcctagtataaaaatagtgccagaaactatatttgttcaaatatattgaaaaggtataagaatacaaatagatattaacagtggctagtgatgcctcataaggtttt

SEQ ID NO: 2040 - DNA, 269 bp, Homo sapiens
ttttttttttaaaagtataattttgcattttattcattcattccatcagctgggaattgctctattgtacaaatacagttttgtacaaaaaaatcacaaaatgttacgaaataaaaaaagtacaaactgcattacttaataaatatgactaaaagtagttaaagtggcaatgagattgattttaagttggaaacattgtttgacccagcaaaccatacaagctctgtttacagacatttctacatcaatacagggcaatcctattttgc

SEQ ID NO: 2041 - DNA, 1206 bp, Homo sapiens
gcatgcaaccctctgcctccctcccacgttttccataatgattttatttatttatagctgacacaaggaagatggacccttctaaaccgtcttccaacgtggccggagtagtcatcattgtgatcctcctgattttaacgggtgctggccttgccgcctatttcttttataagaaaagacgtgtgcacctacctcaagagggcgcctttgaaaacactctgtattttaacagtcagtcaagcccaggaactagtgatatgaaagatctcgtgggcaatattgaacagaatgaacactcggtcatctagtacctcaatgcgattctgagatatttgaatttcataaaattgtaactgaaatttaaaatttttagttcaatgtgattgttttctttaaaatgagtactgaattgtactggtctgtccttttttcctttgcctaattgaagaaataattgcttgttttctagcctggcaagatattttcataaaagagggataacaatgctgattactaccttttaaaatattttagataaatgcacagcaccacagcaccacatctaagcattagtgatgggtagctgatgtcagcttcatgtggattttaagcactctagaaacaatgaagcttcttggcatattttaaggagctcccaaaatgtgttacctattaaattgtaactcagcaagtagaagaccatttgaaaagtcaggtacaaatttcctcaagtggcataaaaatgtagtcagttttctcttttaccagtttttatttccactccaattatttagaactttatttgtacatgtgcagaagaataaggcagctgagaatcttgtttcccccaagagagttttacaggctgagtgttgcaaatgtgttctttgtcctgttatatgtatatcaggaatacaaggatgtgaaataaaactgtaaatttgcataactggatgtacttagataatgtgaaataaacattaaagacaaggtctatttttaatagatttgcattttggtgatcttagtataaatttgcttttaaatgagatgtatttatccactcactttacactttaacttgacacttatgatattatttgtagagaaattctttaaatgaaactcatgaactattttgaaaaggagtgttgctaaaatgctgtgtgtaaaatgaattttttaccgtaatgattttgccagatc

SEQ ID NO: 2042 - DNA, 273 bp, Homo sapiens
tttgacatttataaatgaacctttattaaagacacttcaatgccatttgttagacacttcaatattttacatggttttcaatgtacactgtaccaaaatttctataaataaataactttgtacataaaagtaatactccctctttcacattgcctctcagaagcagcaaattcacatattttgtggaagtaagattagtcagttaactgtcaagaacaaaattctaaatgtgcttaccttttgaacagtgatgacacctgacagtaattgtta

SEQ ID NO: 2043 - DNA, 320 bp, Homo sapiens; identical to SEQ ID NO: 333

SEQ ID NO: 2044 - DNA, 356 bp, Homo sapiens
tttaaatttcaaatatattttattcaaaattctccatttaggagaaaagatatataacaatgtttacacatgctttaataacttatttcactgtacaacttacattctgtataacagtacaataaaccagccaaagaaaataaccagttagcacttaaataagaatctaccatgtaaaaaacacagtatgggacactacaaggtagtatttatatattttttaaatgactgagctacagtacaacagtcatctagttcagtggttgtctaaaacatcaagctgtccacatctttctgattcatgatgggaaagctattatgacctttcacattcgaacatgtcattttgttgtgta

SEQ ID NO: 2045 - DNA, 293 bp, Homo sapiens
  misc_feature: n=a,t,g or c
ttttttttttgatgttttaatgttttattcatggtatgtaaagactgaagctgaatggctctttgctctacttttctattattacacttaacatttgtcattacttttggtgccagaacagttttcatggatggcagggaatatcctgaattggaaatnatatatatatatatatatgganacagaaatacaagaaaatatgcttgggggaaaaaaaacattgacaataaaacaactgcttctttaaaagtagtattaataaaggcttcaaaactccaaagtaattttctggt

SEQ ID NO: 2046 - DNA, 299 bp, Homo sapiens
  misc_feature: n=a,t,g or c
gcaggccaaaaccntagtttatttcagcatcagcagtatcttagccatcaaaaaaataaactntaccaagggtgacggaagtntctacagcaaggntaagggctcgccagacggcgaacatcaggggtgcatggtgggcactgcccaggcaataagtnaggaagcagcagggctggtntcgggtgtgggccgggcttnatttctgggcaggcatgaggtcgtcgatggcctggccctgctccagccgctgctccatctcgatgagcagcttcactccgtccaccaccatcttgcaccag

SEQ ID NO: 2047 - DNA, 331 bp, Homo sapiens
ttttttttttgtaaagacagatatatttatttcatatgacagcacgtttcacaggatatgtacagaatgtctgtgtaccactgactttaatactgtacttctataaagtttatagttataaatattgtatgccacataagcaataaaattcttacatataaacagcaatctaatatagagaacacagagttcacaaagagatccttagtgtctaacttctgctctgcttttaacagaactagtaaatatttaataatacatagggtaatggctagttatttgcagcatacctttaactttcataactttgtgcattttcagcaacttgccc

SEQ ID NO: 2048 - DNA, 577 bp, Homo sapiens
taagagaaagaaaaatcaaatatttattaaaagtaccataatacagacccatttcaagtaaggacaaacacaccaacatatttcttagtagtttcctcacaatagattattaaagcatagaacaattattcatattcataaagaaatgacttcaaaataggttaaattgttttccatctactctgtttaataaggcaagaacaaatgattcactttagacaaatagtctcatcaaaaaagggctaaaatagtaaagattcatcacctaaagtggtaagctttggatatctgaaatataaacatgttagtactctgatgatcgccagataaatgaatttaggcaagaaaacacattgttacaaaaagcctgggttctaaatcaggattactgagacactaacaatttcagatttttgccttcattccaagaagcaccaacccagttttctttagactggcctgggctgggtttggggccaagatctagtccaaatggtagtctgccagtggatgtaggtaaataagatagagggatgaagaaaaatttagcatcccgccagctgaatatcgggttcgc

SEQ ID NO: 2049 - DNA, 433 bp, Homo sapiens
  misc_feature: n=a,t,g or c
cacaaaaatttcttttaatgaataaataatttgatgaaatcaaaaatatttacaatataaacacatggaaacaatacaaatctgacagaaacgacgactcatacaacatatctttgttcattacacatttatctgttagtcctggaaagctacataagcatatattatgcaacatgttaaagtacaaatattacctaaaataatatattaccataatgccagatagcattctccacagaacaaaaacatacactcagctgtaacaataacgagggtcacgggccacaaaataataccccaaaggtacaaattccttcataagaatatagttgtgctcttcagtttaccagctggtctacggctgctctaggaagccgggtgggaaggagtacnggatttgggcactgtggctggtgtggtgnggtttcnggaa

SEQ ID NO: 2050 - DNA, 384 bp, Homo sapiens
ttttttttttttttcttaaattatatttattatatgaaatacaaaatgtggaaaatttggaaattacagaaaaaccaaagatgaaaattacagtgactttgttccaccatacaaagataaccactcaacattttttagtatgccttccgtcttttttatctgctctacgtatacaagcatacacccatattttaaaaaacaaaattgaaatcacataacatgcactatttttacaaccttttaatattcaaggagcatttttctttcagtcagatgttcttttacatgacttttaatgtctgcgcggtactccaccatctggatggagatacaataatttacttaagcaatcccctattgcaaactttcgttacagcagaaaag

SEQ ID NO: 2051 - DNA, 207 bp, Homo sapiens
tttttttttttttttgacggttcctatataacgtttatttctggaagttaaagtagatacagcaatataccaaaaaaaaaaaaaaaaaaaaaagacaaaaaacctcacaataatataaatttttacactatgaagtacacattggaatttgaatgcagtggccaggacagcagcttataaaccaccttataggtaggtaagcaaccc

SEQ ID NO: 2052 - DNA, 435 bp, Homo sapiens
ttcaggtcgtaagccactttattccagtcccttgaacatcacaggctggttttatttgggacagaacaggttttatttccaaaggtccctgaacacagcaatgacaatgaacagcccagcagaggagtgacataaaccttgaggcatgcagtcttctgggtgctgtggagtcccttggccaaacttgagtgcactggattcgacatacaaagaccttcctgggaaggagaaggagaaaaacaacctccgagaaaatacagacagggtcagtggcaggccaggacagggactatttctatacattctggaagtgtcggcattcatcagcctgcatgtggctcacttttctttctggaatagccggagacctctactcctcactccagctctaggttccaaggaacagagtgggtctggctcagcgagatgtcatga

SEQ ID NO: 2053 - DNA, 352 bp, Homo sapiens
  misc_feature: n=a,t,g or c
attaaataaaagttttgcttttatttaaaataaaatkcatttatacagtccttbgaacccattggattatttgaacmacatactggtaatccaccctctcccctcgcacccctttytgggtctatgtgakctaggamatttctctgatctagnancawatatmagattgtacacagcgcaacagmtctagaacatggccagtccaggcattagagttaaggacattgtggcaaatcatgatcataatgaagtcattcttaatttagtagatattaamctgacgttaattatatctcttaaaggcatttaattaacggagagatttctacawttavgccatctbctagttgtg

SEQ ID NO: 2054 - DNA, 422 bp, Homo sapiens
tttctttgtattataaactgacttttaataataataaaaaatctatcaagaatttaacgagaagaatctgtacattttaaagtaaaccagtgcacaatgcgctggccctgggcctcccccatttcccgcagcagggctaaagcgggtcctcctttgtctctgatgcaagatacagtgacaaggccactgtcctgccctcgtgtatgctgcggcaagagagggaagcgcaccctggcttgcgggaggctcggatgccagatgccgggaggcttcaagctcccaggcctgggggcagcagggagccccacctgaactcaccacctgccaggggtgacaggcgtccccccgcttcctccccagctgtgacctttccctgaaggcataccgaagctggggggacaaactgccgagggggcttgtgt

SEQ ID NO: 2055 - DNA, 427 bp, Homo sapiens; identical to SEQ ID NO: 360

SEQ ID NO: 2056 - DNA, 1603 bp, Homo sapiens
ggccagggatcaggcagcggctcaggcgaccctgagtgtgcccccaccccgccatggcccggctgctgcaggcgtcctgcctgctttccctgctcctggccggcttcgtctcgcagagccggggacaagagaagtcgaagatggactgccatggtggcataagtggcaccatttacgagtacggagccctcaccattgatggggaggagtacatccccttcaagcagtatgctggcaaatacgtcctctttgtcaacgtggccagctactgaggcctgacgggccagtacattgaactgaatgcactacaggaagagcttgcaccattcggtctggtcattctgggctttccctgcaaccaatttggaaaacaggaaccaggagagaactcagagatccttcctaccctcaagtatgtccgaccaggtggaggctttgtccctaatttccagctctttgagaaaggggatgtcaatggagagaaagagcagaaattctacactttcctaaagaactcctgtcctcccacctcggagctcctgggtacatctgaccgcctcttctgggaacccatgaaggttcacgacatccgctggaactttgagaagttcctggtggggccagatggtatacccatcatgcgctggcaccaccggaccacggtcagcaacgtcaagatggacatcctgtcctacatgaggcggcaggcagccctgggggtcaagaggaagtaactgaaggccgtctcatcccatgtccaccatgtaggggagggactttgttcaggaagaaatccgtgtctccaaccacactatctacccatcacagacccctttcctatcactcaaggccccagcctggcacaaatggatgcatacagttctgtgtactgccaggcatgtgggtgtgggtgcatgtgggtgtttacacacatgcctacaggtatgcgtgattgtgtgtgtgtgcatgggtgtacagccacgtgtcctacctatgtgtctttctgggaatgtgtaccatctgtgtgcctgcagctgtgtagtgctggacagtgacaaccctttctctccagttctccactccaatgataatagttcacttacacctaaacccaaaggaaaaaccagctctaggtccaattgttctgctctaactgatacctcaaccttggggccagcatctcccactgcctccaaatattagtaactatgactgacgtccccagaagtttctgggtctaccacactccccaaccccccactcctacttcctgaagggccctcccaaggctacatccccaccccacagttctccctgagagagatcaacctccctagatcaaccaaggcagatgtgacaagcaagggccacggaccccataggcaggggtggcgtcttcatgagggaggggcccaaagcccttgtgggcggacctcccctgagcctgtctgaggggccagcccttagtgcattcaggctaaggcccctgggcagggatgccaccctgctccttcggaggacgtgccctcacccctcactggtccactggcttgagactcaccccgtctgcccagtaaaagcctttctgcagcaaaaaaccccc

SEQ ID NO: 2057 - DNA, 349 bp, Homo sapiens
ttttttttttttactcattacacatttattgtacattttcacaatctggatgcgccacagaattgggggcatggggtgggggaagaggggggcaggggacactgggataatatggggggtctaaaacacagcacccccacctccagcatctctcctaccctttcacaccacagcttagatatccctgctccccctccacacagaaaaccagaagtctggggggaagaaagtttgggggccccctcccgtggcaggttaagggactgtaccctcaaacccttaaaattgtgccatttaaaaagacaatagacccttcctcaatcagttcacccaatgagaggacagctct

SEQ ID NO: 2058 - DNA, 451 bp, Homo sapiens
cctgtttgctatcctttattaaagggcccacatcctcatgggactccagccaaaccagtcaggtcccccaaatatagcaggaggcctggaaggggaggggaatgacttatgatcctaccatgcctcccaagaaacagaaaccaccacagacagacagacagacggacaggggctggggagaacttgcctcactctcagtcctctcccactttcccccacttgaaaagaaagtcaaacactggctacgagcaccccagccccccaccccacccatagcagcgtttgtgggacacaccccctttgcaaggggtggccccgaggcagcttcctatctctctcttcactttggtttgctcctggcaactccgtgccctcttcctttcctcagcctccggttcggtctcccccttgtcttctatcacctactcggaccttctctctcatctcctgg

SEQ ID NO: 2059 - DNA, 426 bp, Homo sapiens
aagagaatttaaaatcatatttattgttttgcaaacaataacttagacatttcttaatattttaaaaaccccaacacaaagtaataaatttggcttcttttccccacaaaaatgggaaatacctttcagtaaaggaaattttaaattatttttacacaccagttggttgttggaatttatagctctttaacatatgacatcagcaaaaataattagcattaactgattaatacataaaacaatttacaatcatatggtaagcaggaaacaaaaaccgatcagaaaacaccgttttatagtaattttcaaacagataaattattacagtatactttatccccaacatctctgagcccattaacagagtacttctatacatataaagatataataaaaggatacggtatttattggcaacagcaaatt

SEQ ID NO: 2060 - DNA, 299 bp, Homo sapiens
  misc_feature: n=a,t,g or c
aatggtcagcaatgtctttttaatacagatgtggtacagaatgtttaattacagcagggcagtgattccagttaaataaaattaaaaacctttattttcccaaatataaaattactaaattaaagtcttaaaagaaaatataacatggtgacagctttaaagtacaccaccattcaccacaggntttatgatttaccaattacatactccaccattttggcaaaaggatgaaattcttaaaactgtttataaacctaatatagtaaagactgtatacatctccatattgcacattttta

SEQ ID NO: 2061 - DNA, 466 bp, Homo sapiens; identical to SEQ ID NO: 298

SEQ ID NO: 2062 - DNA, 479 bp, Homo sapiens; identical to SEQ ID NO: 338
  misc_feature: n=a,t,g or c

SEQ ID NO: 2063 - DNA, 441 bp, Homo sapiens
  misc_feature: n=a,t,g or c
cctggtgcagccagatgttctaacttttgaacaaatgagcgtggtcagtaatgtacaataactcttgagtctgttactttggcctagctaagcccatctggccctcggnatncctgcaagatgacagacagaagagcaagggcactatcagaaatcggaacaggctgccccctactcctcccagcctctaccagtacacagagacagactggagatagagcattcgcagccagttggatcttggttcttttgtcttctgaaaataaaaataagtgcttgtcttgtctttggaggtcaaagagaaccgcactaatttatttcctcgagggggcttttctggaggagaggatcctcagtcctgtgccaaggtttcacgctgtttggccacacgccaggcctttcttctggatctggtctgcacgtccagagatgatggaggaa

SEQ ID NO: 2064 - DNA, 376 bp, Homo sapiens
  misc_feature: n=a,t,g or c
ttcaattttccacatataaaaatatattttttattgcaatactgaacagttaaggccacaacactttagggagaatttgagatacacatattttgaaatgacttgttaaaaatattagcataaataaatatcaaaactggtcacacttatagaagctgaataaaacanattaanncnntnatcnctttaanngactactatcaganactttactncanangttanaacatttctcangtatacattacaactacacttggtgactgtgaaaacataaatatatatttatagtattgtacagggattttgatcttctctctgtatttgttggtgggatattctgatgattctgactcatggtggttctgggtcggca

SEQ ID NO: 2065 - DNA, 423 bp, Homo sapiens
tttttttttttttattaggaatttagcttttattcaaaattaaataagcaaaagcaaaaattttaagaaacttttacaaattacttacataaaagaaagttaataaggacagtcacaaatttgcaacaaataattacaaaagtttctagggcagcatgaatataaaccatgttgcagcatggtgatctaactgtgatatgaataaggcataactaacatttgcaccgagaccagaattaaaaacaaaaacaaactttaaaagcttagttctatattaaacttcttctcttttcccagatccttaatgggtttatactatgcatttttttttaaaacaaacacatcatgtcaaactataaattacacaaatgggcagttaatgtgaaaagccccctaaaatgtacaaactaactggtactgaat

SEQ ID NO: 2066 - DNA, 200 bp, Homo sapiens
attttttcctaaggataaagtacctttgagcatgagtgtatcacagctttcattaggaaaacttttcattacatacttgtttaaactctgtcttccagggtaaaaataataaggttgaatcattttattaaaaatactttttaagaaaataactatgaacatctgaatattaaagatataaaaatggcacataattcata

SEQ ID NO: 2067 - DNA, 521 bp, Homo sapiens
tcagagttttctttaactttatcatttataaagccatacaatgcattgcaaagaaacaaagcagctgtacaggagtggggacgcgtcagtgtacaatacattcatgtccaggataaggagcatacaccaggatttatacacggtggcagcggctataggcacgatgatacaaaatataaagtatatttccatctatataaatacacagctggggtggggaaggatgctgggtgatcttgtttcccccgcagagggcctgggaggcagggagggtggtgggaagggatttcttacatttgttctcaatgatgggtctgaagggaggagagaaatggggaaacacagcctgcacacactggatgtgctctcacacacacgcacaaacaaaacacagacacaggagagtttcaaacagcttaacactgattggaaaacaagcttggggacatccctctacagtaactccactgctggcaagagcccaggcgtgggatatgaacagaggtcctccaacattttgg

SEQ ID NO: 2068 - DNA, 425 bp, Homo sapiens
aatatgccacaatttttattgcaacgtggccatttttgtgagggtggggagtttgatctcaaaacaatgttccatttaaggctcttttatacagaaattgccatcatgactgatattcaaaatatctttagtgttgcaggactcacatggtaaacataaaactcctacacttattcagtagtgtacactcaatggaaaacaaaaaggcattaataacagctatttcttttaagaagatatgcaggtaacaggaatgaacactgaggtactaggataagttgatgacacagttaacaaaacttaattggcattccttttaggatattaaacttattacaaaaagtgcttttaatgcatagtgttatatccgtgctgccatatcactaaaataggcttgccaaggcagggtgaggtgtatgaatgcg

SEQ ID NO: 2069 - DNA, 427 bp, Homo sapiens
  misc_feature: n=a,t,g or c
aaaaacagaagcgcgaccatttctttattaaattatacaaaattgttnnngaggggggcagctgtggggctcngcaaccccggccccaccccggcctggcgctgtctgagaagaggggatctgagggagatccagggatcaggcaggatagggatggggcaggacatgaggctgggggatgcagaggttaggtgggagaggctaccggagaagaatgaggctggtaggggagggagaaagagagcaaagagagagaggagcaattgggggccagctggagagctcanatggagcaggtcaggaggtgnaacaattngcagagtnatgggtggagggcgcagtgtctnggagagggcggaaattagaaggctggtgagaaagaagagggtggcagctctggttgctagctctctcctcgtgccgaatg

SEQ ID NO: 2070 - DNA, 1098 bp, Homo sapiens; identical to SEQ ID NO: 2037

SEQ ID NO: 2071 - DNA, 578 bp, Homo sapiens
  misc_feature: n=a,t,g or c
ttttttttcttatacaaagataattttattaatgaaaagatcacacaaaacaaagtttttgtattcaaagttgtctgtttaaaatgtggaaaaggtaatatttacaacatttcccatacagtacatagtttttgtgccttaacagaatgctaaatagagaaaaaaaccaaaagcaaatgctaaattgagagaaaatcaaaagcatcagaaaatcttgcccaaagaataatacttaataggaaacaaaattaagaaaactccttaatattttaaagtatgttgtataaaaacgttgtgtcttgtttattaagactaccttttttccatttgattggcactaatatcgctatcacactttttaatgttcagcaaaatcctagtgagctgccgaaatgaattctacaaaatgtctgagaaaggtactgtataatacaaaatgtaatattctaaatgttaaaaaacnaaagttaaaacnaaaaatataagccactgtaagtgggttataataccatccatgggtgggcctggaaccnttaaaaaaggggagtccattgcncttggccctaatataccaagng

SEQ ID NO: 2072 - DNA, 616 bp, Homo sapiens
  misc_feature: n=a,t,g or c
agagagatgaagacacacgtttagtattttattatgaatcattatttcaaagtcccatactgcatattcatataaggcaacacggcacaatttcaggcttcatcacaaaggatgaaaaagactgtttctaactccctcctaatttgcagacatgcttgaacacttaatggaaggtgaagtttattttgtggcccctcagttctctttcaagtcctctagtagaaagtctccatggtgtgatcttctgactgggtagaacccgcaattctctgctgtttttagtctttgttccagatgactaattacatgacttggctgcatttgtgaggggccgacaccaacacaattaaaccagtgcaccattcagggccatagggtaggaggcaccagggttcaagaaggaacttggcgtgttgtaggatctgagttggggcggctctattccggctatccatcgatctcctcttcctcatcctcaaaagcttcctccccgtcattggcggtggcatcctggtactgctggtactcggataccaggtcgttcatgttgctctccgcctcngtgaactccattcatccatgncctcanccgtgaaccagtgcaggaaggcctggc

SEQ ID NO: 2073 - DNA, 406 bp, Homo sapiens
cactaggaaacaaaggatattttattccttttttctgttgttgttgaggatagatcacgatacagagaacagcaatgggtcacagcgcacggtttggttggtttccgcgggaacacagaggacaggaggggcgggatctgggttgagttcccactctcgttatgaccttcaacctctcactgttcccaagggctgcacggagcctgctgagtctccaacccacctcgctcaccgctctgaccaccgacagcacgagaaacggatgcgggagttgcctctgctgcccatctaaggggacgtaggcagagaagcaaaggcctctgctctccctccatccatcccggtgtgctggccccaacggaacaggagtccttcaactattgcctgccagagacccaattgcagg

SEQ ID NO: 2074 - DNA, 359 bp, Homo sapiens
  misc_feature: n=a,t,g or c
actttagagatcatacctactttcctgcctttttgataagtaaggcatgaaatgaaacaaaagttttgagctgtaaggtgcctataaaggatgtcactacagcattcacaatgctaggtgtgtaagatgacatggctgttaccatgtactaaagaaccccatcatgtgagagatcgctcaaagtcattaacacaaagcagtgaaaatcatccagcaaagcagtgcttatgagagactagaattcagagaaatgcaaggtacgaacttctctctaatccaagggtattctgctgtgatcttctaatcagtgatgattggtgcttatgcacaccgacatcttcatgggagangaccaggct

SEQ ID NO: 2075 - DNA, 383 bp, Homo sapiens
tactctctagaaaatatttattgacacattttaattttctttccatattctgagaaataaacaaaatacacaaaatacagtaaaatgcacttttcccatttcaaataaatatactatactcttgtaaaaaaatttaataatctgtgtaatttgccacagtatattaatcagtgaaataaaacaaagaatctctaaattgtcacatgttttaatgattctcacaagcatttttctggagaaaaagaacactattttctgtagaatttatattgacttggagactattgcttcttgtttggagaaggcaaagataagctttttaaaaagtgtttagtgtcaaaaagagtcttcatttgggagaaaaacagcatacaagtcctttc

SEQ ID NO: 2076 - DNA, 408 bp, Homo sapiens
  misc_feature: n=a,t,g or c
ttttttaattttcaaangactgttgatgtcactgtggtttattaggtaaatacaaagtataggctcttgcattttttaaaaagcaaaaccaaagagattagaaaccaagtacacatatcctctttagaagagaaacataaatcagttttaacaattaggcacttaaaaatgtaaatgtaagacaacattatagaagtataaactatagttacactcctaaattcctcctgaaatgtttacaaacacaaaatcacaagcatggaaaacaaatttcctctttatcaaaaaaggaacctgaatttgaatcccatgtgataaaccnatgattaaggtactgggtgggtaggggaaaaagggcttctggaaattttacntatttgntttaaaatgttaggcttttcntaaaac

SEQ ID NO: 2077 - DNA, 446 bp, Homo sapiens
atgttagaaaattttaatatatgattttggtagggccaatacatagtaaagacatagctttatttcaattgaaccgaataaaatgatgtatttcagtaaattaaggcaaaggagatagatgctatgaccagtggtgcaaaatttttcaaaaatttatacattagatttacctttacaaggttatagtcaagaataattaatttgtattttaagcaaactctactgcttttcaaaaaatgtcttaatcttgagtgaggaatagtgaaggtaatcttaatatactgtttaactttaaaaaataattttagaattatagaaaagtttcaaaaagagtatagaatttatgcacacccttctgccagctttccttaatgttaacaatgtacataaccataatatgattttccaaaaccaggaaattaacattacagtagtgttttaatttt

SEQ ID NO: 2078 - DNA, 202 bp, Homo sapiens
  misc_feature: n=a,t,g or c
attcatggtcgantattatttattgtcagaaaggtacagcattcacaccaatatcagacaaaatagattttaactaaaaaattatttcgngacaaaaataacaatatatgtnaataaaaggctcaattaaaaatgtataacaattataaacacatacacatcaaacaacagtnccccaaaatacataaagcaaacattgaca

SEQ ID NO: 2079 - DNA, 4732 bp, Homo sapiens
tccagcctgagtgttctgcagggaaatgtgctgtgtaaacactatgcctatttcctgcttggagaacaggttttgaggtagagctctcaggggtggggaagaagcctggcagcccacatgctataaatgctgttgtccacctttatgctctaacttggaggcagagacccaagcagctggaggctctgtgtgtgggtgagtttagccacatcccctaggtgttctccagcttgaggatcgcaggcagagaggaccagcccagcagccacaggcctgaccaaggccaggttgggaaggagggcaactccccattttccactgggaggtgtttcacagcatggtcaacatggatgacctacaaagaccctcatgctttgatatcttccttggccagatccatccctaccagggactcagcagggcctaagcagggggagtgggagaacagaccccaagaggaaggaagacctcatcactgactgtgagagggtcatcaccccccgatgatcaccttgaagggtccaggctgtgggccctattcatctcttttcattctcaggtcgctgatttcttggagcctgaaaagaaggtaactgggcatatgagggacagatggagtgagtcagtgagtgagtgacctcatccttcctcctaacagcctgggagggacagggcaggttttctgcagagcatggaagattcagctgaaatcagagaggtgaagccagtttcccagggtaacatagtgaggcactgaaagaaaggagactgcactgagcccaggtccctgggctccccagagctccttactcttcctcctcctcagcagccttgagaccccacaacctccagccggaggcctgaagcatgaggccatgccaggtgccagatgatgcttggaattttcccgggtgcttcgggtcttcccagcactctggtctcgcccgccctgcctctcgctctgcccagcttcctgagtcctgacagagcacagtgggggaagatgttggcagaggtggcagatgggctcacggccatccctccagcaggagcagcgactggacccagagccatgtggctgtgccctctggccctcaacctcatcttgatggcagcctctggtgctgcgtgcgaagtgaaggacgtttgtgttggaagccctggtatccccggcactcctggatcccacggcctgccaggcagggacgggagagatggtgtcaaaggagaccctggccctccaggtactgtgctgcagaccccaccctcagctgagggacacagaccccttttcaggaggcccatctgtccaggcccctaggctgtgggccatagtgagctgggggctatagtaagctgggtgggacttcagtctgcagggctggtgggttcctggggcccttatgatggcgcatcctggagagtctgtcctcatagtgcccacggagtgatagctgagccagccccggtgataatgggcatcgagtctcattagctccaaccagttgtgggtgacagatcctacacatccatgtctcttttctctgcaggccccatgggtccgcctggagaaacaccatgtcctcctgggaataatgggctgcctggagcccctggtgtccctggagagcgtggagagaagggggaggctggcgagagaggccctccaggtgagcagggcgggcaggtgggcagtggaaacatgggcacagcgacctgaagtcagttacacaggggtgatgggggtcagacaaaccctgcaggtaccccaagggcatttggctcaacctaagtaagagaatatgaatttgagggagaaagccgaggtgtctggggagtgtggtcacaattcagagaagggcaggtgtgggaagtcctccgtgcctcatgaccgctgatggggacacactgagtcaggtgtgggacgagggacagctctgggaggcaggggaggcatgtcctgggatggagccctgggggcagtctgaagggtgaatgcggacgaggcatccaggcagatggtgtgatcaggagccccacagacagaggggaactttgaagctcagagcggtaagcaagtccatcagggcagtgcagagagcatcatgcttgcccttggtggagggtgcgggagagggacttgccccacagaggcgggcagacagaacccctcgagggacagagcaggaaagaggacaaggggtgggggtctcagcaggggcaaggcttcactaaagaataggggaccacggggtgtggagacacactggaatctcgtggaccctctgagcctagggtctgggtggtgcctaacagcaatgaaagggcagagttccaggattgcagatggcaaaacgcctgcgtggcagcaagtgggagtcttcactggcctgcccctccttctgtgtggggcactctccacagggcttccagctcatctagatgaggagctccaagccacactccacgacttcagacatcaaatcctgcagacaaggggaggtaaggggaccccctgggcctcacggggtaggagtttcccacaaattcccctcattctcagcaccaccttctagaatagagatgacaaacaagcgtgcacatgcaggtgttggggaaaggaatgatgcttgcttttctgatgtctttgaatggccaagaggagacaagcagacacaattcactccccatttcataagaaagcaagttctctgcctgtcttgctttccactgaatcctaggaaattgcaccatttctggcaataagtaattgttacttagatgaatgaataaatggaggagagtctaaaagtgaatttagaaaactgcaattggaagaggaagagaagacacagagagaggcagagatggagagactggggaggatctggtagcagagaccctaggtgagggaggtggcttagagacaaagtggtcagtggcctgacctggactcctctgctctcagccctcagtctgcagggctccataatgacagtaggagagaaggtcttctccagcaatgggcagtccatcacttttgatgccattcaggaggcatgtgccagagcaggcggccgcattgctgtcccaaggaatccagaggaaaatgaggccattgcaagcttcgtgaagaagtacaacacatatgcctatgtaggcctgactgagggtcccagccctggagacttccgctactcagatgggacccctgtaaactacaccaactggtaccgaggggagcctgcaggtcggggaaaagagcagtgtgtggagatgtacacagatgggcagtggaatgacaggaactgcctgtactcccgactgaccatctgtgatttctgagaggcatttaggccatgggacagggaggatcctgtctggccttcagtttccatccccaggatccacttggtctgtgagatgctagaactccctttcaacagaattcacttgtggctattagagctggaggcacccttagccacttcattcccctgatgggccctgactcttccccataatcactgaccagccttgacactccccttgcaaaccatcccagcactgcaccccaggcagccactcctagccttggcctttggcatgagatggaggcttccttattccccatctggtccagttccttcacttacagatggcagcagtgaggccttggggtagaaggatcctccaaagtcacacagagtgcctgcctcctggtcccctcagctctgcctctgcagcccactgcctgcccagagccatcaggatgagcagtaccggccaagcataatgacagagagaggcagatttcagggaagccctgactgtgtggagctaaggacacagtggagattctctggcactctgaggtctctgtggcaggcctggtcaggctctccaggtggtcagagggcccagtggtgccccagcacggtggtgcccaagccaaccctgtgactgacatgtacgattcactcctttgagtctttggatgccaactcagccccctgacctggaggcagccggccaaggcctctagggaagagccccccactgcagacatgacccgagtaactttctgctgatgaacaaatctgcaccccacttcagacctcggtgggcattcacaccaccccccatgccaccggctccactttccccttttattaatacattcacccagataatcattaaaattaacatgtgccaggtcttaggatgtgtcttggggtgggcacagtacccggtgactcttggggatatttatttattttccctgagcctatatcttcatctgtgaaatggggataaaaatacttgttgctgtcacaattattaccatctctccagctagcaaaattactaccagagccgttactacacacaaaggctattgaccgagcacataccatgtgccacacaccttgacaaaatcttttaatacagtttattatgtactattcaatctttacacaatgtcacgggaccagtattgtttacccaattttttataaggacactgaagcttagaggagtgaaatgttttgagtgttatttcagagagcaaatggcaaagactggatccaaacccatcttcctggacctgaagttcatgctcccagccaccccacccctgagctgaataaagatgatttaagcataataaatcgttagtgtgttcacatgagtttccatagctttggttccaagaaacatcacatttctg

SEQ ID NO: 2080 - DNA, 386 bp, Homo sapiens
tttccaaaagtgttcttttatttctagtaacatatattgtataaatactctattttatatgcacttccacaaaagcgatataatttaaaagtttttttcattagaaataaatgtataaaaataaatatgttattataggcatttattactaactatagtccttcttggaaggaacacccaaaccaatacttataaagtacatgtaatttatagtaacatattttactatatacatatggaaaaaatcatattctcacagaagagctgaacagacattcaccaggatacgactgttggacaagctgctggagatggacctgctacccctcagcagcctccccaccacaagacaagtgatctcaatgtccccaaacctgtgggaccct

SEQ ID NO: 2081 - DNA, 290 bp, Homo sapiens
  misc_feature: n=a,t,g or c
gaatttnanagcattaagtgcattttattttattgtattagcacataaattgatgaagccacatggtgaaaatctgtgagaaactgaaggttttcatttgttttctgtgccccactgtatatcacctttcaaaataatgctttctgctgggtccaaacttcacttggagcaaagaaaggtagttaaaaggtttcacttaaagctacttcgttatgggtgctactgaaagtaaggtaaaagcaaacagcagtaacatggggactttaantgaggcaagagaagggattcag

SEQ ID NO: 2082 - DNA, 551 bp, Homo sapiens
  misc_feature: n=a,t,g or c
gttcataaccaacaatataaaccgtggtctcatgtaacacataaacaattcatgcctttcatagtttattattattaaagtctaaacaaaattgcaatttcttaggtaaccttatatttacaataaatgaagattaccctcaaatgctagaagctgtctaggtccgtccggtgtgtcagattttcctcagattagatgtgccaataaccaagtttattcagtaaacaacttgtacttgtttcatctggttttattactctcacccataaacagtaatgactctctgaccctctggaaatatgtaatgcttccaatcttgctttgtgtatctcatttaatttgttataaggtagtactgattttagcatattaatgcgatttcttccntgttgtttgctttggnctgtgttcaatccngagggccttaaattgtccattattttggggaggaaaacccgtatttttgttaggttacatattatggaaatttcacttcagggggaactgctgggctnccgtggcttggtttcntaggtacttttccgtgccgg

SEQ ID NO: 2083 - DNA, 369 bp, Homo sapiens
  misc_feature: n=a,t,g or c
gaacttgccaccttatgcccggccccgattcctcaggctccaggagtctttggccaccacagagaccttcaaacagcagaaagttcggatggcaaatgagggcttcgaccccagcaccctgtctgacccactgtacgttctggaccaggctgtaggtgcctacctgcccctcacaactgcccggtacagcgccctcctggcaggaaaccttcgaatctgagaacttccacacctgaggcacctgagagaggaactctgtggggtgggggccgttgcaggtgtactgggctgtcagggatcttttctataccagaacntgcggtcactattttgtaataaatgtgggctggagctgatccagctgtctct

SEQ ID NO: 2084 - DNA, 342 bp, Homo sapiens
tttttttttttgatgatttggatattattattacaaagaatttaaatatacaagtttggctatgaaagacccagctaagccacttaggcaaaagtctatctttgatgtcatagtttccaagaagtatcataagagtcaaacagttaaacatttctctgtgcttttttttctattttctagaaatgttgtagagagaagctcatcaacttacttatacaaatcagatatactgaggaggggagataaactgacatttccatattttataatataatgtggaaagattcagaaatgactgagaagatacagtgatatgatatttaaagcaaatattggcatatc

SEQ ID NO: 2085 - DNA, 440 bp, Homo sapiens
  misc_feature: n=a,t,g or c
gtttattaaaccagatttattctccacaagctgaagatacctgaggttacatgaggactggcattaaataatttataaatgtatttttgactgacagacttttatcataaggattcatgtgtttacaaaagcaaaatccaacctctccagagctagaaagtgggaaggtgcccgggctgcaacacagccttgggggaggatgaggccacataattctctctgcccacactctcagaatgccccaagaagttagtagctacacaaagccaagccttgggggaaaacctggtccgtggtgtggactctccaaaatgcagacccaaccggangccgggcccgcctttccatctggaggcactgcagggcttctgaaagcggcccatcccaggagcctggcaaacacccccagagaccctcaggatgcgcagccccggggcttt

SEQ ID NO: 2086 - DNA, 1806 bp, Homo sapiens
agggaacatctcggggagcctggttggaagctgcaggcttagtctgtcggctgcgggtctctgactgccctgtggggagggtcttgccttaacatcccttgcatttggctgcaaagaaatctgcttggaagaaggggttacgctgtttggccgggcagaaactccgctgagcagaacttgccgccagaatgctcctcctgttgctgagtatcatcgtcctccacgtcgcggtgctggtgctgctgttcgtctccacgatcgtcagccaatggatcgtgggcaatggacacgcaactgatctctggcagaactgtagcacctcttcctcaggaaatgtccaccactgtttctcatcatcaccaaacgaatggctgcagtctgtccaggccaccatgatcctgtcgatcatcttcagcattctgtctctgttcctgttcttctgccaactcttcaccctcaccaaggggggcaggttttacatcactggaatcttccaaattcttgctggtctgtgcgtgatgagtgctgcggccatctacacggtgaggcacccggagtggcatctcaactcggattactcctacggtttcgcctacatcctggcctgggtggccttccccctggcccttctcagcggtgtcatctatgtgatcttgcggaaacgcgaatgaggcgcccagacggtctgtctgaggctctgagcgtacatagggaagggaggaagggaaaccagaaagcagacaaagaaaaaagagctagcccaaaatcccaaactcaaaccaaaccaaacagaaagcagtggaggtgggggttgctgttgattgaagatgtatataatatctccggtttataaaacctatttataacactttttacatatatgtacatagtattgtttgctttttatgttgaccatcagcctcgtgttgagccttaaagaagtagctaaggaactttacatggtaacagtataatccagctcagtatttttgttttgttttttgtttgtttgttttgttttacccagaaataagataactccatgtcgccccttccctttcatctgaaagaagatacctccctcccagtccacctcatttagaaaaccaaagtgtgggtagaaaccccaaatgtccaaaagcccttttctggtgggtgacccagtgcatccaacagaaacagccgctgcccgaacctgtgtgaagctttacgcgcacacggacaaaatgcccaaactggagcccttgcaaaaacacggcttgtggcattggcatacttgcccttacaggtggagtatcttcgtcacacatctaaatgagaaatcagtgacaacaagtctttgaaatggtgctatggatttaccattccttattatcactaatcatctaaacaactcactggaaatccaattaacaattttacaacataagatagaatggagacctgaataattctgtgtaatataaatggtttataactgcttttgtacctagctaggctgctattattactataatgagtaaatcataaagccttcatcactcccacattttccttacggtcggagcatcagaacaagcgtctagactccttgggaccgtgagttcctagagcttggctgggtctaggctgttctgtgcctccaaggactgtctggcaatgacttgtattggccaccaactgtagatgtatatatggtgcccttctgatgctaagactccagaccttttgtttttgctttgcattttctgattttataccaactgtgtggactaagatgcattaaaataaacatcagagtaactc

SEQ ID NO: 2087 - DNA, 2304 bp, Homo sapiens
gaattcgtccaaactgaggatcacaagtctccacattctgagtaggaggatgagggtctgagttaggatttgggtcctgcagggcttgctaaggaatcccctgatggcctaggattccacgcagagcacatctggtgtgagagagctcgctgcaagggtgaaggctccgccctatcagatagacaaccaggccaccaagaggcccagccctccaaaccctggatttgcaacatcctcaaagaacagcaacgggccttgagcagaattgagaaggaaatacccccacctgccctcagccgttaagtgggctttgctattcacaagggcctctgggtgtcctggcagagaggggagatggcacaggcaccaggtgctagggtgccagggcctcccgagaaggaacaggtgcaaagcaggcaattagcccagaaggtatccgtggggcaggcagcctagatctgatgggggaagccaccaggattacatcatctgctgtaacaactgctctgaaaagaagatatttttcaacctgaacttgcagtagctagtggagaggcaggaaaaaggaaatgaaacagagacagagggaagcctgagccaaaatagaccttcccgagagaggaggaagcccggagagagacgcacggtcccctccccgcccctaggccgccgccccctctctgccctcggcggcgagcagggcgccgcgacccggggccggaaaggtgccaggggctccgggcggccgggcgggcgcacaccatccccgcgggcggcgcggagccggcgacagcgcgcgagagggaccgggcggtggcggcggcgggaccgggatggaagggagcgcggtgactgtccttgagcgcggaggggcgagctcgccggcggaggccgagcaagcggaggcaggagcggcggcgacggcggcggcggcggcggcgcccgagcacccgagggggtccgagccccggcagccggccagccccgcgccacaaagggagcgcccccgccgcccggcaccccgcctccctccccaatgtcctcggccatcgaaaggaagagcctggacccttcagaggaaccagtggatgaggtgctgcagatccccccatccctgctgacatgcggcggctgccagcagaacatcggggaccgctacttcctgaaggccatcgaccagtactggcacgaggactgcctgagctgcgacctctgtggctgccggctgggtgaggtggggcggcgcctctactacaaactgggccggaagctctgccggagagactatctcaggctttttgggcaagacggtctctgcgcatcctgtgacaagcggattcgtgcctatgagatgacaatgcgggtgaaagacaaagtgtatcacctggaatgtttcaagtgcgccgcctgtcagaagcatttctgtgtaggtgacagatacctcctcatcaactctgacatagtgtgcgaacaggacatctacgagtggactaagatcaatgggatgatataggcccgagtccccgggcatctttggggaggtgttcactgaagacgccgtctccatggcatcttcgtcttcactcttaggcactttgggggtttgagggtggggtaagggatttcttaggggatggtagacctttattgggtatcaagacatagcatccaagtggcataattcaggggctgacacttcaaggtgacagaaggaccagcccttgagggagaacttatggccacagcccatccatagtaactgacatgattagcagaagaaaggaacatttaggggcaagcaggcgctgtgctatcatgatggaatttcatatctacagatagagagttgttgtgtacagacttgttgtgactttgacgcttgcgaactagagatgtgcaattgatttcttttcttcctggctttttaactcccctgtttcaatcactgtcctccacacaagggaaggacagaaaggagagtggccattctttttttcttggcccccttcccaaggccttaagctttggacccaagggaaaactgcatggagacgcatttcggttgagaatggaaaccacaacttttaaccaaacaattatttaaagcaatgctgatgaatcactgtttttagacaccttcattttgaggggaggagttccacagattgtttctatacaaatataaatcttaaaaagttgttcaactattttattatcctagattatatcaaagtatttgtcgtgtgtagaaaaaaaaaacagctctgcaggcttaataaaaatgacagactgaaaaaaaaaaaa

SEQ ID NO: 2088 - DNA, 327 bp, Homo sapiens
tttaaaatagctaaataaatctttaatatttctaattgcaaatgtacagaaattgcacagccacacagagtcttagaacaccaacagcttcctctgtacattattacatagttaaaagtcgcagctggagggaggagctccagcccaaactccaacgtttgcattttttccttttcacatacttacaaaagaggggagctgggacgcggtgtgggagctggggggctttgtggctgagtgtgtagaaaagagagaggctgtttccctggacagtctggctcccgcagtcgtgcgggccgcagggggaggtgtacctggggcagatgc

SEQ ID NO: 2089 - DNA, 418 bp, Homo sapiens
tttttcttccataattctttattaaatatttgacaagttgcatcgcttctttacaatgacttcattttgtcacattagtcttttgctgtcaggaaaacaatctacagtttctctttagatctctcaagaaaaaagaaaagcgaaaggattgttcttcaagaaaacttcctgtgtgtatcaaattcaaccatattttaaagctattctgactgtgaaaatgagcattattcataagttgccttaaaaaaattcaaggtagtttggtttttaccactgtatcaaatagtacttggcttcctattaggaggtgggtttataataaaaagttatgaaacattgataatttatttggaatgcttgaaactcttttcaccttaaaagtcactgtttttttcatgtttcatttgatgatagatcc

SEQ ID NO: 2090 - DNA, 382 bp, Homo sapiens
ttttttcatgttttagcaaaatttattagttcgtgttgggccacattcaaagccatccacacaagcttcttgtaggccattgtaacacaatgttaaaaggtacagtaaaaatacagtattataatcttattgtgtagcacggctgtgaggctcattgttgaatgaagcatccttaggcagcacgtgactgcatgcagatatgtgtgctgaaagaactttgcctttttaactaaattaatggacccaggaacagaacttggtcttttacttgccattcattgtccttcataagggatggcctcccaacacttaacttcagctcttcaaatacttgtcattaaaccttctaatactacaaacttactacccagagtatacacat

SEQ ID NO: 2091 - DNA, 409 bp, Homo sapiens
gtttcaggtgttttattaagtgggccatactgtagctggtttctaagttgcaaaacataaatttaataataataacatagccagttagattgtgacaagcttttcctttccttaaaaaaagaaaatacttaaaaacacacaatggcgggttaaataaataaaacattttaaaaaagaaaaaagaaaagaaaaacctgttaaaacatgcttatgtttacttctgtgaaactgtgccaacaggaaatgtggtatttggcacgatgacacatcccggcatgtctccttcccaaacaatactgacaaaaaagaaaatacgtgggactgactcatcggtgcttgcttagaggcactactaaaaatccctttgattggagcatggggcttcccgcgcagacacctgtgtgtggcc

SEQ ID NO: 2092 - DNA, 1757 bp, Homo sapiens; identical to SEQ ID NO: 506

SEQ ID NO: 2093 - DNA, 290 bp, Homo sapiens
tttttttttttttttttggcaccaaattagaacaattttattatttaacataataccaatgtatatacattatcctcccaaataagaaacaatttgattccaaagtttaaaatgtagtttccaaaatgaacccttgtaaatttgaagaaaaagaaagaaagccctgcaagttacacaaattttgatccatgactaaaataggcaccctgtaccaatcacctttctcatacaaaaatgtatattataaataaaactttcaaaaaagatcttggatgttttattgcacatca

SEQ ID NO: 2094 - DNA, 150 bp, Homo sapiens
ttttttccttgtataaattattttatttattattgtaattagatcttcacaaagttgtcttttcactgtgttttgtcaacgtgaaattaaattgtagttataagcaaaagttggttgcctagggaacaattgtatattcagtttaacaga

SEQ ID NO: 2095 - DNA, 547 bp, Homo sapiens; identical to SEQ ID NO: 354

SEQ ID NO: 2096 - DNA, 440 bp, Homo sapiens
  misc_feature: n=a,t,g or c
aacaacatggagattttgttattanaaatttcaaaacaaaatgaaggaatttccacatatttataaccttcaaagtacaatattaatacatgtctgtcagttagaaagaacagcagtttgttaggctacaaggtttaacataaaaccaatttacaaatgtgaaaagcagtagtggtccaatattcaccattacacatgaatctgtttcttccagaattttttaaaattaaaattttagtatcgtgaaatattaaaataacaccccaaacatgccacaatcactattcacaaataaagttaaaatggaatatacaaaaatccacttaatactgttaaataacaacaataaactacaagatttcctgaacagaaatggtaggacccctgaatttttacagtgaatttcaggaaaagaaattaagttatgactattttcatga

SEQ ID NO: 2097 - DNA, 353 bp, Homo sapiens
ttttttttttttttttttttttttttttttaccaggcgatacagactatttgtttattatgaaactaactggtaaagcagagtaaatcccattctatattatagcactacaaacatccttagtcattccttcatttgttcattcattcattcatgcattcagtgagtatttcttaagctcctacagtgtaccaggaggcactctgttcattgtggcattacaaagataaagattaaggcacgtactctgccctcaaggagctcccaatctaattgtgcagagagatgtaaaaatgaagcatgaaactccatcgtgaggagcgccgagaacaaaagtctgctcgaagtgaggca

SEQ ID NO: 2098 - DNA, 434 bp, Homo sapiens
tttttttttttttgcattttttaaatggctttattaaaggctacaagtataaaatatgactaagttacaagtcgtcagtaagaatttattacttttgaaaatgttaattaaagaaagggagacgcaaagaaagggaggctcttcctgaaatccacacaggggggtgcggctcagacgggtgacagacccccgctgttcccagtagggcagcacccccaaacccagggggccaagggaggggctcccagatgaaacagaggctggttgctgatttcttgggggaacttttgtaaaaatgaagacactgaatccttgagctgaatcccaggtgcagagactggggggaggtggagaatccaaaatcatgctcaggtttctcctgaaaagtgtgtattttctaaaaaataaatataaactcctggtttgagaaactc

SEQ ID NO: 2099 - DNA, 418 bp, Homo sapiens
tttttttttttttttagggttgaaatgatgtgcttttatgggaaacaaaaatatccaacaacaataacaaaagcccttcaatctcgccaagttcttaaccagtgacaataaggcaacttccatgattgcgtctggctggggatgattctaaagggtcaggaaagtgaaaagacattggccaaaaagagaagttgcagggagggctgacatcctacatgagaacacagcagacttccctctggcccctcaccctatcaccccttcaatttagaatctccccccaatctacaaagatccttcctgaatttcctcagatgcaatctcttccagaaagctttcctgggtctgctctagctgcatatgacttttcattaacatcacgcacactttctcattccttctccgatcactttctgcc

SEQ ID NO: 2100 - DNA, 327 bp, Homo sapiens
tttttttttttttggcttcagaattttattttaaaggttatacaggatcagattatgagactgttgcaaacctgggtaatctgtcaggtgtatgagatgaaagagaaaagccagtcaaatgaaaagacaaagtaaatatgtttttcattttatagaaccattcagtagtaatgtaaccattcagttaaccactggttaactgttatgataactgaatgttaatcagttaaccattcaaaactaaccattcagatttctctatacatgagccacattattaatgtgatctctaaatcttttggtaagttaaaatattcgtgtttatta

SEQ ID NO: 2101 - DNA, 499 bp, Homo sapiens
  misc_feature: n=a,t,g or c
gaaaatttgcctcctggtaaccctgtaatggatggggcccagaaatgaaatatttgagaaaaacaagtgaaaaggtcaagatacaaatgtgtattaaaaaaaaaaagcctattaatagggtttctgcgcggtgcagggttgtaaacctgcntttatcttttaggattattcctaaatgcatcttctttataaacttgacttgctatctcagcaagataaattatattaaaaaaataagaatcctgcagtgtttaaggaactctttttttgtaaatcacggacacctcaattagcaagaactgaggggagggctttttccattgtttaatgttttgtgatttttagctaaagagagggaacctcatctaagtaacatttgcacatgatacagcaaaaggagttcattgcaatactgtctttggatattgtttcagtactgggtgtttaaaggacaaatagctgctagaattcaggggtaaatgtaagtgttcagaaaacg

SEQ ID NO: 2102 - DNA, 300 bp, Homo sapiens
  misc_feature: n=a,t,g or c
gaatcatctcccgctttcccgggactttgctttcactttcntcagtcttgtggacagagtcaagtagattttcaaaagtgctccagaaaggccggaatagtcatgtagtggatgaaaagggcagtcacaaaactgcttaagaccagctgtcttgccagtaattgcagtgctttaagatttaattaaaaagccgcctgcctttaacccaagaacacttggtattagggcaccatgtcttggtcacggctgctacgtgtatctgatgtaagttnaccatggnctgtcatnattatnttgctg

SEQ ID NO: 2103 - DNA, 469 bp, Homo sapiens
tttgttttttgttttttagatttcaaggcaaggcacgtaatgtggacattatatcttcgtgcaaattaggattactggaaagagtatttttaattaaaattttaagagacatagaggcaaaatgtgtctgcccatgcacactatggatctgtcaatacaagaaatttgttgaacaaggctaatgtctgaaagcaccatgcaagttttcagcaccctgattacatttgttttctcaagagtgcgtttttatatcctacaccctggcgttcccagtttgtaaactgtaagctttacccttgtgacatggatttgcctgcctctttgtctctataatgcagattttatagaaccttttgtacaccctatgggttcttgatgcaaccagtaattttaaataaataaattctacctccaaggaggctgcagctaaaccaacataagtgctgtgttttcattaattttatttttc

SEQ ID NO: 2104 - DNA, 305 bp, Homo sapiens
  misc_feature: n=a,t,g or c
tttttttttttttttcagaagaaacgttttattatttttttgtcggggaaaaaaagccatataaatattagagtataaaacttgcgtgagacacaggaagagggtggggtgggagctacgtaactatgcgaagagaagcgcttataggagangtcagtacggnggaggggntcgccttagccagtggacacagcacaaaacacaacacgggccgccgcggcagatcaangacagacggctgcncggacccnccgcccgctgcccacccgccatcacgtaaaagcacaccgcantacactactggc

SEQ ID NO: 2105 - DNA, 491 bp, Homo sapiens
  misc_feature: n=a,t,g or c
cacggccagcctctcctgcagctgcgcgtngctcacctcgctctggcccctggtgccgtccacctccagggtggcctcaccgtccctcagcgagacggtgaccacgtgctcttggccgtcgcagacttgatctccattagggccaaggcgtatgctccacggccaggaccaccagctgcttcttgagtttcttcgtggagtgatagtctaccagtgccacagagagaggcacggcacggaggtcgggggcccagangcgcaaacaagcacgcctgtgtctgcggctgggcggattgtgaagccacgacttctacttcccaggttgattcagtcccgacgtccagaaggggtccgcatgtagtccaggctgtagaaggcgaagcttnccccggggttagaaagaagcctctctccgtcaccgagaagcactgcatcctcgtgttnatttcaccgttttcctggatggtggtgtcttctccgttcagccagtt

SEQ ID NO: 2106 - DNA, 3890 bp, Homo sapiens
atgaaggtgataagcttattcattttggtgggatttataggagagttccaaagtttttcaagtgcctcctctccagtcaactgccagtgggacttctatgccccttggtcagaatgcaatggctgtaccaagactcagactcgcaggcggtcagttgctgtgtatgggcagtatggaggccagccttgtgttggaaatgcttttgaaacacagtcctgtgaacctacaagaggatgtccaacagaggagggatgtggagagcgtttcaggtgcttttcaggtcagtgcatcagcaaatcattggtttgcaatggggattctgactgtgatgaagacagtgctgatgaagacagatgtgaggactcagaaaggagaccttcctgtgatatcgataaacctcctcctaacatagaacttactggaaatggttacaatgaactcactggccagtttaggaacagagtcatcaataccaaaagttttggtggtcaatgtagaaaggtgtttagtggggatggaaaagatttctacaggctgagtggaaatgtcctgtcctatacattccaggtgaaaataaataatgattttaattatgaattttacaatagtacttggtcttatgtaaaacatacgtcgacagaacacacatcatctagtcggaagcgctccttttttagatcttcatcatcttcttcacgcagttatacttcacataccaatgaaatccataaaggaaagagttaccaactgctggttgttgagaacactgttgaagtggctcagttcattaataacaatccagaatttttacaacttgctgagccattctggaaggagctttcccacctcccctctctgtatgactacagtgcctaccgaagattaatcgaccagtacgggacacattatctgcaatctgggtcgttaggaggagaatacagagttctattttatgtggactcagaaaaattaaaacaaaatgattttaattcagtcgaagaaaagaaatgtaaatcctcaggttggcattttgtcgttaaattttcaagtcatggatgcaaggaactggaaaacgctttaaaagctgcttcaggaacccagaacaatgtattgcgaggagaaccgttcatcagagggggaggtgcaggcttcatatctggccttagttacctagagctggacaatcctgctggaaacaaaaggcgatattctgcctgggcagaatctgtgactaatcttcctcaagtcataaaacaaaagctgacacctttatatgagctggtaaaggaagtaccttgtgcctctgtgaaaaaactatacctgaaatgggctcttgaagagtatctggatgaatttgacccctgtcattgccggccttgtcaaaatggtggtttggctactgttgaggggacccattgtctgtgccattgcaaaccgtacacatttggtgcggcgtgtgagcaaggagtcctcgtagggaatcaagcaggaggggttgatggaggttggagttgctggtcctcttggagcccctgtgtccaagggaagaaaacaagaagccgtgaatgcaataacccacctcccagtgggggtgggagatcctgcgttggagaaacgacagaaagcacacaatgcgaagatgaggagctggagcacttgaggttgcttgaaccacattgctttcctttgtctttggttccaacagaattctgtccatcacctcctgccttgaaagatggatttgttcaagatgaaggtccaatgtttcctgtggggaaaaatgtagtgtacacttgcaatgaaggatactctcttattggaaacccagtggccagatgtggagaagatttacggtggcttgttggggaaatgcattgtcagaaaattgcctgtgttctacctgtactgatggatggcatacagagtcacccccaaaaacctttctacacagttggtgagaaggtgactgtttcctgttcaggtggcatgtccttagaaggtccttcagcatttctctgtggctccagccttaagtggagtcctgagatgaagaatgcccgctgtgtacaaaaagaaaatccgttaacacaggcagtgcctaaatgtcagcgctgggagaaactgcagaattcaagatgtgtttgtaaaatgccctacgaatgtggaccttccttggatgtatgtgctcaagatgagagaagcaaaaggatactgcctctgacagtttgcaagatgcatgttctccactgtcagggtagaaattacacccttactggtagggacagctgtactctgcctgcctcagctgagaaagcttgtggtgcctgcccactgtggggaaaatgtgatgctgagagcagcaaatgtgtctgccgagaagcatcggagtgcgaggaagaagggtttagcatttgtgtggaagtgaacggcaaggagcagacgatgtctgagtgtgaggcgggcgctctgagatgcagagggcagagcatctctgtcaccagcataaggccttgtgctgcggaaacccagtaggctcctggaggccatggtcagcttgcttggaatccagcaggcagctggggctgagtgaaaacatctgcacaactgggcactggacagcttttccttcttctccagtgtctaccttcctcctcaactcccagccatctgtataaacacaatcctttgttctcccaaatctgaatcgaattactcttttgcctcctttttaatgtcagtaaggatatgagcctttgcacaggctggctgcgtgttcttgaaataggtgttaccttctctgggccttggttttttaaaatctgtaaaattagaggattgcactagagaaacttgaatgctccattcaggcctatcattttattaagtatgattgacacagcccatgggccagaacacactctacaaaatgactaggataacagaaagaacgtgatctcctgattagagagggtggttttcctcaatggaaccaaatataaagaggacttgaacaaaaatgacagatacaaactatttctatcctgagtagtaatctcacacttcatcctatagagtcaaccaccacagataggaattccttattctttttttaatttttttaagacagagtctcactttgttgcccaggctggagcgcagtggggtgatctcatctccctgcaacctccgcctcctgggttgaagcgattcttgtgcctcagcttcccaagcagctgggattacaggtgcccgccaccacgcccagctaatttttgcatttttagtagagatgggtttcaccatgttggccatgctcgtctccaactcctgacctcaggtaatccgtctgccttggcctcccaaatgctgggattacagacatgaaccaccacgcctggctggaatacttactcttgtcgggagattgaaccactaaaatgttagagcagaattcattatgctgtggtcacaggggtgtcttgtctgagaacaaatacaattcagtcttctctttggggttttagtatgtgtcaaacataggactggaagtttgcccctgttcttttttcttttgaaagaacatcagttcatgcctgaggcatgagtgactgtgcatttgagatagttttccctattctgtggatacagtcccagagttttcagggagtacacaggtagattagtttgaagcattgaccttttatttattccttatttctctttcatcaaaacaaaacagcagctgtgggaggagaaatgagagggcttaaatgaaatttaaaataagctatattatacaaatactatctctgtattgttctgaccctggtaaatatatttcaaaacttcagatgacaaggattagaacactcattaagatgctattcttc

SEQ ID NO: 2107 - DNA, 950 bp, Homo sapiens; identical to SEQ ID NO: 1228

SEQ ID NO: 2108 - DNA, 433 bp, Homo sapiens
  misc_feature: n=a,t,g or c
gacagcagtgcccaagctggcatccgtcagnacntgtgggcctttgtgttttgatgctacacatgtctatggagggccacttcttctgtaagtctgtggggcctcagcatacccaataggcagcaagtttcagtatttcccagttgtatgtcctcatggtggggctatgtctcccccaccacttcccctctcatcaggctagactttaacatccatcaatcatgtcttgagtcttgctccttcctcttggcttagtcatgtgactacagatcagatgcgtggccntagtgttttaggtgtgcaggtaccatggccccaaatgctgttgtatctgactgaggaaaatgccnctgtcctcnggcgtcccnagggnccgtaggtgnnagctgaatnggcatatgtcttccactctgttcagtgtnnaacactgcca

SEQ ID NO: 2109 - DNA, 529 bp, Homo sapiens
tttttttttttggccacatgtttatttttataaaatatctagaacaggcaaatcatagagacagaaaatggattattgtttctagaggctgggggaagaggaggattagagtggcagctcactggtatggagtttctaggtagatggaaatgttctggaattagatagtggtgatgattgcacaactctgtaaatatactaaaatccactgcatcatttactttaaaggggcaaattttatggcttgtgaattacatttcaataaaaagaagatgaggaaacctaggatatgtcacaatcccatgccacaaactacttacacttccaatataaaaactatatcaacaatagtttacatcacgttcattgcttgctaaagtaaggtcatgaatgtatcaaaatattttataaaagttaaaatttaggagatccatcatttctcttttcaatccatcactgattcattcaatatatatttatgtgtatgccaggctcttcatcaggtaaagtgtttaggagagatataaag

SEQ ID NO: 2110 - DNA, 432 bp, Homo sapiens
  misc_feature: n=a,t,g or c
ttttttttttttttttcagaaattgaatagttttttatttgtttgggtcaatctcagtactactagaactcaaaatactatattctaattgttctaatttgtaccatctgcaaaagaccctttaagactgcttcaatgattctgaaaagaattaagnggtnttnttantaggtgcctgaccttagatattacaactgtttcatttacaaaacctccactacaaaacactaagcttgnaacaaaacaacaaaatgaaagccacataatttgagtaacacaatagtacatattcttcagctgatgagagtaatagggaatgtatatacttcctacacaaatgcatctagggaaagcaggcnatatttattccagaactagaaaaggttaccatnaaatctatcnaacaaaattcattttgggnaaattccngta

SEQ ID NO: 2111 - DNA, 464 bp, Homo sapiens; identical to SEQ ID NO: 475
  misc_feature: n=a,t,g or c

SEQ ID NO: 2112 - DNA, 4187 bp, Homo sapiens
ggcgcgaacccgcagcgcttaccgcgcggcgccgcaccatggagcccgccgtgtcgctggccgtgtgcgcgctgctcttcctgctgtgggtgcgcctgaaggggctggagttcgtgctcatccaccagcgctgggtgttcgtgtgcctcttcctcctgccgctctcgcttatcttcgatatctactactacgtgcgcgcctgggtggtgttcaagctcagcagcgctccgcgcctgcacgagcagcgcgtgcgggacatccagaagcaggtgcgggaatggaaggagcagggtagcaagaccttcatgtgcacggggcgccctggctggctcactgtctcactacgtgtcgggaagtacaagaagacacacaaaaacatcatgatcaacctgatggacattctggaagtggacaccaagaaacagattgtccgtgtggagcccttggtgaccatgggccaggtgactgccctgctgacctccattggctggactctccccgtgttgcctgagcttgatgacctcacagtggggggcttgatcatgggcacaggcatcgagtcatcatcccacaagtacggcctgttccaacacatctgcactgcttacgagctggtcctggctgatggcagctttgtgcgatgcactccgtccgaaaactcagacctgttctatgccgtaccctggtcctgtgggacgctgggtttcctggtggccgctgagatccgcatcatccctgccaagaagtacgtcaagctgcgtttcgagccagtgcggggcctggaggctatctgtgccaagttcacccacgagtcccagcggcaggagaaccacttcgtggaagggctgctctactccctggatgaggctgtcattatgacaggggtcatgacagatgaggcagagcccagcaagctgaatagcattggcaattactacaagccgtggttctttaagcatgtggagaactatctgaagacaaaccgagagggcctggagtacattcccttgagacactactaccaccgccacacgcgcagcatcttctgggagctccaggacatcatcccctttggcaacaaccccatcttccgctacctctttggctggatggtgcctcccaagatctccctcctgaagctgacccagggtgagaccctgcgcaagctgtacgagcagcaccacgtggtgcaggacatgctggtgcccatgaagtgcctgcagcaggccctgcacaccttccaaaacgacatccacgtctaccccatctggctgtgtccgttcatcctgcccagccagccaggcctagtgcaccccaaaggaaatgaggcagagctctacatcgacattggagcatatggggagccgcgtgtgaaacactttgaagccaggtcctgcatgaggcagctggagaagtttgtccgcagcgtgcatggcttccagatgctgtatgccgactgctacatgaaccgggaggagttctgggagatgtttgatggctccttgtaccacaagctgcgagagaagctgggttgccaggacgccttccccgaggtgtacgacaagatctgcaaggccgccaggcactgagctggagcccgcctggagagacagacacgtgtgagtggtcaggcatcttcccttcactcaagcttggctgctttcctagatccacactttcaaagagaaacccctccagaactcccaccctgacagcccaacaccaccttcctcctggcttccagggggcagcccagtggaatggaaagaatgtgggatttggagtcagacaagcctgagtccagttccccgtttagaactcattagctgtgtgactctgggtgagtcccttaacccctctgagcccgggtctcttcattagttgaaagggatagtaatacctacttgcaggttgttgtcatctgagttgagcactggtcacattgaaggtgctgggtaagtggtagctcttgttgcttcccgttcagcgtcacatctgcagtggagcctgaaaaggctccacattaggtcacctgtgcacagccatggctggaatgatgaaggggatacgctggagttgccctgccatcgcctccatcagccagacgaggtcctcacaggagaaggacagctcttccccaccctgggatctcaggagggcagccacggagtggggaggccccagatgcgctgtgccaaagccaggtccgaggccaaagttctccctgccatccttggtgccgtcctgccccttcctccttcatgcctgggcctgcaggcccaccccagccaccactgagtccactcggagtgccctgtgttcctggagaaggcattccagggttgaatcttgtcccagcctcagcctgggacacctaggtggagagagtggtctccgctctgaattggatccaggggacctgggctcattcttcttggctcaccaaccctgcaggcctcatctttcccaaaacccactttgtcttggtgggagtgggtccgcgctgctctgcagcaggggctggggagtggacagcatcaggtgggaaagtggagtccaccctcatgtttctgtaggattctcaccgtggggctggaagaaaagagcatcgacttgatttctccaaccactcatccctctttttctttcttccaccactccccaccccagctgtagttaatttcagtgccttacaaatcctaagctcagagaaagttccatttccgttccagagggaagggaacctccctaggtccttccctggcttgttataacgcaaagcttggttgtttatgcaactctatcttaagaactgcccagcctcagctgaaaacccgaatctgagaaggaattgcgtcatgtaagggaagctggaattaagggagctgagccagtcatggttgtggcgtgtgagtcaggagacctaggtttcagcccctctctactgtcagcgagctgtgcaacgtgggcaagtcattgtcctctgagctgcagtttcctcatctgtcacatcgctacagacaagacctccctggaacccttctgattgtcttagacactgtggttgcaaaacccacggaaagcctcatttgtgtggaaagtcagaggaaaaatgatccagtggacacttggggattatctgtcattcaagatccttccttcaaccccaaggccagctcccatctcatttccagaaaggctcatacctggcttgcagggaagcatctgtcttgtcattccaggtgccagaatcctctcagagtcattgaagggtgttcacccatcccacccaaggcttggcacactgccagtgtcttagcagggtcttgtgagggctgggggcatccaggcactcagaaggcaaaggaaccaccctacccatttggcctctggagggggcagaagaaagaaagaaacctcatcctatattttacaaagcatgtgaattctggcattagctctcataggagacccatgtgcttccttgctcagtgcaaaactgatgattctacttgctgtagatgaatggttaacacgagctagttaaacagtgccattgttttgccagtgaagcctccaaccctaagccactgggacggtggccagagatgccagcagcctctgtcgcccttagtcatataaccaaaatccagaccttatccacaacccggggcttggaaaggaaggtattttggaatcacaccctccggttatgttgctccagtaaaatcttgcctggaaagaggcagtcttcttagcatggtgagctgagttcatggcttttttttgtagccagtcctgtccctggccatccatgtgatggttttggatggagttaaacttgatgccagtgggcagtgcatgtggaaagtatcagagtaagcctctcccctccagagccctgagtttcttggctgcatgaaggttttctttagaatcagaattgtagccagtttctttggccagaaggatgaatacttggatattactgaaagggaggggtggagatgggtgtggcagtgtatggtgtgtgatttttattttcttctttggtcatgggggccaaggagaaaggcatgaatcttccctgtcaggctcttacagccacaggcactgtgtctactgtctggaagacatgtccccgtggctgtggggccgctgcttctgtttaaataaaagtggcctgg

SEQ ID NO: 2113 - DNA, 372 bp, Homo sapiens
ttttctttttttttttcttttttttttttttttggtttcatttttcttttatttttttaaaaaagcccctaaattctatggcttcaagggagcatcagagaaacgtaaatgccatttctgtacacttggtaaagcaaaaactagactcacagccaccgccctgggacggcccaagctgctccactctgcccggcagcctccagggcaccccactgggaaccgcccgccagtccagggccgcccccaggcccctgcaatatacctgcagggctgggccgtggggctttaaggcgttttgtctccggctgcttgccggatgtcggagcagagaggcaggaagctccgtgcccacgcgccccacgcggcagggct

SEQ ID NO: 2114 - DNA, 386 bp, Homo sapiens
tttcaaagttaaaacacagttttatttactcatttataaatactgttgtgtttacaggcatcatatagaagtgaatattattattcccaaactttcaaacacagaatactcaaaactatataacaacaaccagtaaaacaaaaccattcatcttagggttgaaaggccactcaaaattgcataaaaatacattcagttcacaaagcaagtctggctgcttctccctaaacaaccccaaccccaccccatcccaggtgtatttacagtggactgaagttaatccatacaactcagctgaaaaacagttacatctggtgtgtgaaccttggtggaactagggtgaagggtggagtaaagacacaaaatgctaccactaaaatgggaga

SEQ ID NO: 2115 - DNA, 426 bp, Homo sapiens
taaagcataagcaatagagtaaatgcatgagtaaatatcttgagtatcccataaaccttaatgttaaagtcatattgtaaatctctgacttcttattaccaaggacactctatctgttgcctcttactcttgacagatcttggtctcaacaataaattcgttggggaagtgtctaatcttccagcatttatcaatggcacgtttgttgaaacccagcaagaggtctctgcgacgaaggggaaaggactttctgttattgcaaagttggtaaataaagatgccaaggttactaacatcacgaatttcctccacagcaactaggtcttctcgaaccacataagtttgaggcaggatatctgccactcgccagtttgccaaagagctctaccagattttttggaggcataacaatagaagtattgaggg

SEQ ID NO: 2116 - DNA, 145831 bp, Homo sapiens
aagctttaagtgcagagcaagaaggaattgaaccttttattatgattccttgagcacctaactaggtgctagactaatgattacaacctgctaacacagaggagtgatttttgtttttaaattgagttaacttaatatatcaaaaaaagaaatctgtttctggcattgctcgaaaaagcagaggacctgacactgcagaatgcagagtgcgagtagcagtccctgtgagatgggctttttgctctgcttttccgcagacctcaccactccctgtcgtctcccaggccatggtaaccattgaccgtggcacctcttttgttcactcacacacgccctgcttcactcatgccttacctgctttgtctctgtagacagtgggaccctccaccctataccaaacctctggggttgggaaaatcatgatccagagccaaggtggatgggcccccctgctcattggaactccaagcccaagtccctgaaccatgaaccccaaaggacatttttccagttctggttctgcttctggaatgcccagggggtcaggagaagccctccttccaaactttagcaggtgacaatttttccgccttagagacctggcccagcaatcttagcctactctggaagcagtgtccacccggggacacaaggaacaagcagattgtgaacagaggcctcctgggtgccagccactgcactggtccctagagggtagaaagacactgtaactggaagctgccctttgtcaagccccaagcattagcccttctgatctttttttttttttaacatggagtctcgctctgtcacgcaggctggagagcagtggtgtgatcctggctcactgcaacctccatttcctgagttcaagcgattcttgtgcctcagcctcccagtagctgggattacaggcacatgccaccacgcccagctaatttttgtatttttagtagagaagtggtttcaccatgttggccaggttggtcttgaactcctgaactcagatgatcctcccacctccgcctcccaacgtgctgggattacaggcatgagccactgcacccagccttctgatctttcaagtcattattgcttcaaagaacctcctccagtaatacaaggataatctatgcaaagacctcaggagaatatttaaaaataagtatgtatcacaaaaagcagccctcttccctggaggcaaacatgattcacaggttcatgtatgtacacacacacacacacacacacacacacacacaccccaaacataagaaaaagtcactccttgtatgttttgcagtatgattttttttccacttaaccctaccttatagttttttctgtctgttcataactatctagtcagacttcaaatatgtttttgaataggtaagacatgcaaatatgaaataaaatagtgtataagggaatatagaacttcccccttcgttcctatttctcgcccttccagttccccttcttagagacactgtggttgctggttacatatgtagccctccagtcatgttatttatttatttatattatttttcgagatggagtctcactctctcacccagactggagtgaagtggcatgatcttggctcactgcaacagccccctcccaggttcaagcaattctcctccctcagcctcccaagtagctgagactacaggcgtgtactaccacacccagctgatttttgtatttttagtagagagggggttttgccatgttggccaggctggtctcgatctcctgacctcaggtgatccacctgcctcggcctgccaaggtgctgggattacaggcttaagccactgtgcccagcctattgctttttttgtgataaagtctcactctgtcacccaggctggagtgcaatggtgcgatctcggctcctgcaacctatgccttctggattcaagcgatcatcccgccccagcctcctgagtagctgggattacaggtgtgcatcaccacacccagataatttttgtattttttgtaaagatgggtttttgccatgttagccaggctggtcttgaactcctgacctcaagtgatccacccacctcagcctcccaaagtgctacaattacaggtgtgagctgctccatccagcctccagtgatgttttatacacatgcagccacatagagagcccctcctgcacccctccaaaatggcagcacaggccccggctgttgtgcgtctcaatctttgcatctaactgtgtattttggccattcatccatggtagtagagagagggccactgcacagtcttctgctatagggatgaaccataatgattaagcctgtctgctattgacaggtatttaggttgtttctagtctttttgctcttaaaagcaaggctgcagcaaaagcacgtgcttggtggaccacgtctgtctctaggttgggtatttagaaagccgtgatattgcactgcagcttcataaagaagccgtgattatccatcactttactgaggaagctcaggggtaggtctgtatgcacaagtcaggcaggtgataaggcaaagccaacactctgcccaggcctgtgtgtctttttttttttgagaccaagtctcgctgtatcacccaggctggagtggagtggcacaatctcagctcactgcaacctctgccacctgagttcaagcagttctcctgcctcagcttcccgagtagctgggattacaggcacgcgccaccacaccttgctaatttttgtatttttagtagagatgaggtttcactgtgttggccgggctggtctcgaactcttgacctcaggtgatccacccaccttggcctcccaaagtgccgggattacaggtgtgagccactgcgcccggccatccctgtgtgtctgaaagccagtgttccttccacttccctcccttccctccctgttcctcatttctgctgcaggccccgggagcaccccctgctcagggctctgtggctgaccatataaagcgtcagagaaaaactggagctgcttcctaatacggtcacaagagggaaatcctgggcctgcagctgggacttgctggtggcacagggcccatgagatgccggctgggacacaggaggctgggatgttgaaacctctgaatttaaccagctggagaggggctcgtggggccagagaggcagaaacacagccaactatggttgggctgggtcgaggtgaaggagaagtggctgaataatgtgggaggaagagcccgatgctgaagccccacgaccctgccgtgagatgtgcggctgcctgcaccagtcttaccttcactccatcgtcataccctggcttgcttagaaagcttttacagaactcagcagagattcagatctacctggaagtatggattaagtgcttgttgtgtgcacggcactgggagagatgtcccaaacaaagaggatggaagtcatattcctctttcagaagctagtgatggagttgaaaaggcagtgtggtccttccttctttttaaaaattcattttattctttttttttttttctttgagacagtctcactttgtcacccaggctggagtgtggtggcatgatctcggctcacataacctctgcctccttggttcaggtgactctcctgcctcagactcctgagtagctgggattacaggcatgcgccaccacacccagctaatttttgtatttttagtaaagacggggttttgccatgttagccaggctgttctcaaactcctgacctcaagtgatctgacctcctcgatttcccaaagtgctggcattaaaggtgtgagccaccatgcccggcctcttccttctttttaaaaattccttttattcttttcttttctctatctctcatctctctttcttcctttctttcttactttccttccttccttccttcttttttttttttttttagagtctcactctgttgcccaggctggagtgcagcaccatgatctcagctcactataacctccacctcctgggttcaagtgattctcctacctcggcctcccgactagctgggattacaggcgcctgccatcatgcctggctaatttttgtatttttagtagagacggggttttgccatgttggccaggctggtctcgaactcctgacctcaagtgatctgacctccttggccacccgaagtgctgggattacagctgactgagtgtctaccctgtccctggcactgtgcggggtgcaggagatacagtagtgtgtgggtcacagtccaggaggtaacatttaggcagagctctaaaagaggagagggaaccagctgtgggaagatgaggggaaaagtgttccaagtggagagaacagcatattgaaggctctaaggtggcaagacttccctctcgtgaaatgaagggagcatagtaagagtcactaaataacattgattgagcacctactacataccagccgccatgctaaatgcttttcgagcattatctcgcagcacatctatgaagggcttgttcgtatgcctccctgttttgtagatgaggataagtgagactcagagaggttaagggacttgcccagggtcacacagcgaagaagtagcaaagtgaaggttcaaattcaagtaccccatacccagttctgagcccttagccactgccctttactgcctccaggtcaagggcttgagtgaggacaggttgggctgtaaatgatacctacattcaaaaggggcgtggcagtggacatggccccagaggagctggagatggagtcgaggcctgaaggagggtggggcttgattgacctttgttcaggtgaccacagactgggctcttctctttgggaggcttgtcctggggacaggggacactgattgaacaggaaatagcccctggcctggctcagtgtagtccactgagtacctactgccgccgtgcaaggcccccaggtcacggaggtgaagtcaggctgtccctgctcccaggaagctgtatcattaatttattcccctggcatgcatttagcaagcatttagttagcacctattctataccaaggcctgtgctgggactgaagaggagaaagggggttccccggactcaaggcacttgcagctggtgtttgcaggatgggtgggagggtcctgggtgatggaatggggaagaggggtgtccaggcaggcagccccccactcccagccccaccaggctggatgttgctcctgggccccgcttacctctaacccttgctttgcttctccatttcggtccgatggagccgcttataccaagctgcttatagttcacccccacggaccccgtgtcctgtttttctgcccatgtccctgctttgtcttgagctggttaacaccttgttgtcctttaagactcagtgcagggaatacctccccacctggaggtttccctgaccacccccaatgtgggttagggccttcccttccttgttcctatcattctctgttcttacgacgtgttttaatgtacttgtctccccctctgatttaagttctttaagggcaggagctatcattgatttctttatctccagcctctgacacagatgtggtatatagtaggtgctcagtaaatggttgatggctatttagacaggcatatgttgactcattcattctccttttaggggatggtgagaacctccgtctccatcaatcctgtttccttttttttttttttttttttttttttgagatgggttctccctctgtcacccaggctggagtgcaatggcaccaccttggctcactacaacctccctccacctcccaggttcaagtgattctcctgcctcagcctgccgagtagctgggactacaggcatgtgccaccatgccctgctaattttttgtatttttggtagaaacagggtctcactgtgttgcctaggttggtcttgaactcctgagtgtgagcaatctgccctccttggtctcccaaagtactgggatcataggtgtgaaccactgcgcccaacaatcctgtaccttcaaagaatattcctctgcagcacccccagacattacataccattgtccctgagtggactgagccctggaaggaccttcccactctctctttttctttctttttcttttttgagacaaggtctcaccgtgtcacacaggctggagtgcatggcacaatcacggcttactgcaacctcaacctcccaggcttaagcaaacctcccacctcagcctcccaagtggctgggactacaggtgaatgccaccatgcccagctaatttttaaatttcttatagagatgggggtctcactgtgctgcccaagctggtctcagacttctgggctcaagcaatcttcctgccttgacctcccaaagtgctgggattacagttgtgagccaccacacccagccagactttcccactctctaattggctccagcccttgactaaaaggcccttgagggctgggatcctgtgtttttttaatgttctaatgtagtcccagcaccttttgcatggcatctgggacgtacagaatgaatgaatgaatgaatgaatgaatgaatgaatgaacgaacgatcagtagtttctgtttctgttggatgggcctaggctggatagcataatggaccatgctcatacctgggggcgggccaggctgggcttggtgctgccaggatcttctttggtgacctcggtcaagtcacttaaccctctgttgcttggttcaccctagctgtaactgagagatggatctgtggttctccctaagtcacttgcagggaagaggatacgctttatggccatcagagtcttgggcagtactgatgtttatcgtttggggaaagcagttcctgtgagacgggttggagcctgtctcctgaactgtgacctcaaccatgggaaaatctagtatccagtaaggaaaaatcatgacaatagtgccttaccacgtacagcatggcgggactcgccttgtgccttgactcctccgtccctgatctgattattttcagatgctcctattcacccagtaggagaggactgctattttttaaatggtaaagtgcatatgacataaaatttaccattttaaacattttaaagaaaacagtgccattaagtgcattcacaatgttgtacagctatcaatttcaagacagggtcttgctctgtcacccaggggctagagtgcaatggtacaatcatagctcactattaccttgagctcctgggatcaagcaatcctcctgactcagcctcccaagtagctgggactacaggtgatcaccaccatggccagctattttttttttttttttttttttgtagagagggggtccggctgttgttgcctgagctggtctcaaacacttagcctgaagcaatcctcccaccttggcctcccaaagtgctgggattacaggcatgagccactacacttggccccagagcatttttatagcctcaaaaggaaaccttatacccatgagcagttcctcctcatttcccacctctttccagcctctgggaaccacaagtctgttttctgtctccatggctttgcctactctagacacttcacataaatgagatgatagagtacgtgacttttcgtgcctggcttctttcactaggcatattttcaagcttcatccacattggagagctcatgtcagtgttggtctctgttttgcagatggggaaggtattaatgatcaggagcaggcgctgtggggtaaacaggagttctagttcccaacttccctccagctgtgtaacctggtgacaacctcaccatgcctcactttgccctcctgtcaaacaggcggtggggaaatcactgttactgagtagttgtgaagatgccacgaggagatgcctctgccatcttctagagactgagtcactggggtttcttcttagatatggacattgggaggtcccagaaagagatcagagggtggtgggaggagagagagcttggaggattattaccttttcctccctccctcctggaccacagttttggcagctgtgtttctgtatgactgcggatccctctggacagcccctttttaggggtgtgtggctttctatgcctccaatgttcagttaacgacattccctctctggctgagtgcggtggttcccacctgtaatcccagcactttgggaggctgagactggcgcatcacctcagctcaggagttcgagaccagcctgggcaatatggtgaaaccctgtctctacaaaaaacaaaataaaaattacctgggcatggttgtgcacacctgtggtaccacctacttgggaggctgaggcgagaggatcacttaagcccagaaactcaaggttgtagtgagccaagatcaccccactacactgcagcctgggcgacagagcaagaccctgtctcaaaaaaaaaaaaaagtaaacaacattctcttctgttcttgctcttcagacttaactgctcccgtcactggttgggtttctttaattctgcacacatatctgtaaacactttctttattaaatgttcctgagttaatatcttaagcacactgttcattttctgtgccacctgttaaatgatgagcatttaatatgattgtcagcatccaaaaaagatcctgcgtagtgcttagttcggtgcccaacacatagtaagtgctcaatgaacggtggctgttatttaagccagtgaggtccggggaggtaaagtggcaggtcggaggagtggagctgagatttgaacccagagctcttcaaaactccacagtttggccaggtgcaatggctcacaactataatcccagtgctttgggaggctgaaatgagagaattgcttgagcccaggaatttgagaccagcctgagcaacacagtgaaacccatgtctctacagaaaatataaacatcagccaggcctggtggcgcccgcctgtagtcctggctactcaggaggctgaggtaggaggatcacctgagtccagaaaggtcaaggtttcagtgagtcacgttcacaccaccgcactccagcctaggtgacagagtgagaccccatctcaaaacaaacacaaaaccccccacagttgcaaaataaaacataggcagcttggaaacccactctcgccctttctcctcttcccacgtacctggaatatcagtgaggcccagggtttccactaagactccaagctccagtttccccatctctaacatgagaatattgagtgcttctgtgcaatctgtctaccctggaggaggtctggaagtaagctgggttctctgtctgcagacgtactctggcctcttctgcgtggtggtcaacccctataaacacctgcccatctactcggagaagatcgtcgacatgtacaagggcaagaagaggcacgagatgccgcctcacatctacgccatcgcagacacggcctaccggagcatgcttcaaggtgagtgaactcagggctgcacggggccagctccagggagcccctcctgtcctgcttgtctgcagttcttgccaggaatgtggagtttggcaggcactgcgagggaccaggagttactgtggctgaaaaagggaaaaagcaaaaggaacatctgtgtttgcagcctgggagggtgagggagagccaagagcttgggcaaatacgggcatgggcccgctccagctccagctccggggctcgctgcccaaggtccccgtcgggccagctgtctgcaaaggatggaaagagggtggggaacagccctggggctgagccattgtggtctgtgttgacacctacctgtccctcaacccctgtgggactgtgggtaaatatcttttcctcttcagcctcagtttcctcatttgtcaaaaggggtgatagtctctatcttgtagcttcttgtgaagattgttaatgctggtttttccaaacttaagacttgtgcctattactttcatgtttatacgttattatttttactattgttttattatttttgagacagggtctcactttctcgcccaggctgaagtgcagtggtgccatctcggctccctgcaacctccgcctcctgggctcaagcaattctcctgcctcagcctcccaagtagctgggactataggtgtggactgtcatgtcaagctaattttaaaaaggtgggtttttttgttttgtttttgttttgttttgttttgtttttggaagtgacaggatcttgctatactggttggtctcaaactcttggcctcaggcgatcctcccactttggcctcccaaagttctgggattataggcatgagccactgcacccaggccttctcaccttctatttagaacactttggagcccctgaaatagccacccccaagtcaaacagagggactaggcagttaatgcaaacaagtgtaccaggtcaggcgaagagtacaagaaactcgaaaactcacaccccctctgaaagggcaccaacaggtgggaacccagggatctgagttgggagttgagaggagcccaattctggaagttcttgaggccggaatccaggtgtgcctgagagatgccacgaccccgcccccaagatagagggactcaggtataagtgccccaactttctgacagtgagccagactccacaggtaggaccagaatcttggcccttctaggcagggcctgccattacctccaaagaccagcaggtggagccttgcaaaggcaatcttggagctgtaatctcaggttgtaaagtgatggctcctggagtcaggtatctgtcttttttttttttttgagacggagtctcgctctgtcgcccaggccggactgcggactgcagtggcgcaatctcggctcactgcaagctccgcttcccgggttcacgccattctcctgcctcagcctcccgagtagctgggactacaggcgcccgccaccgcgcccggctaattttttgtatttttagtagagacggggtttcaccttgttagccaggatggtctcgatctcctgacctcatgatccacccgcctcggcctcccaaagtgctgggattacaggcataagccaccatacccagcaattcctggttcttttctggagctgaggtcccactaagcacattttaatctaaataccaaaaagaaagaaaattctgttagcaaaggagaaggagggggagcgacagatgggtaagcatttctacagtgctctgaaaaaatttatttgtaacttgaaaaagtctttaatattgtatattcattctagaaaaacttaaacatatatttaagtaaaagagaacttgctggcacctatgattctatcatccaaaactcatcaccattaacattttgttacgtgacctttcattacactaactgaactaaatggcatgaaatgaaggaaatttttactatctgaagataattcgttccagaaaaagatcacttaaaacagagaccaaagtttcactgtagatagtatgtgtgtggaggagggaaagagagtgggcaaaatatttgactgagcttgaaaaatgacattgcaggccaggcacagtggctcacgcctgtaatcctggcactttgggaagcccagatgggtggattgctcgaggtcatgagttcgagaccagcctgggcaatatggcgaaaccctgtctctacaaaaaatacaaaaattactttggtgtggtagcacatacctgtagtcccacttcttgggaggctgaggtgggaggatcgcttgagaccaggaagtggaggttgcagtgagccgagatcacgccactgcattccagcctgggtgagagagccagaccttgtctcaaaagaaaagaaaagaaaaccaacattgcaaattataaaaataggttaatttcagcttacatgtaataagaattttattttaattacaagtaggtgctaatttgtagattcagtataaaatgaattaagagtgggtgtggggtttttttctgtaactttttctgggctgagggatgaaatcatgtgagcataaaacgacatcttcatgtcatgcttgacttctgcagcccgagctaaaaaggatcattcttacagatttatttgatgggtcaccagttttcctaagggcttcttttacttctttagtgtttaagtctctcaaagcccctgtggtcttagcgttcattcagctgtgaattgccctgaatctttttctttcttttgtctttctttctttctttttttttttttttttccggatggagtttccctcttggtgcccaggttggagtgcaatggtgtgatctcagctcactgcaacctccacctcctgggttcaagcgattctactgcctcagcctcccaagtaactgggattataggcatgtgccaccacacccggctaattttgtatttttagtagagatggggtttcaccatgttacccaggatggtctcgatctcctgacattgtgatctgcccgcctcagcctcccatagtgctgggattacaggcatgcaccatcacaccaggctaattttgtatttttagtagagatggggctttaccatgttggtcagactggtcttgaactcctggcctcaggtgatcctcccacctcggcctcccaaagtggtgggattacaggtgtgcaccaccacacttggcccctgaatcttttttttggcctttccaaggccactgactttgccagtcactgcaccttgttttccagaactgccactttgttttgtgttcatatcatgatggtggctattgatacccaataattggcaaggtgaagccactgaatcgtcggagaaggaggtttcggtggagtttgatcgctcttgtagtcattgaagaatacttttgtgttgtggggacttttgctttcctagaccagcagtccccaacctttttgacaccagggaccagtttcatagaagtcagtttttccatggaccgcaggggagagatggttcgggatgattcgagcgcattacatttattgtgcactttatttctatgattacattgtcatatataatgaaatcattatacaactcaccatcatgtagaatcagtgggagccctgagcttgttttcctgcaactagacggtcccatctgggggtgatgggagacagtgacagatcatcaggcattagattctcataaggagcacacagcctggatccctcttatgtgcagttcacagtagggttggtggttctataagagtctaatgccgcctctgatctgagaggaagcagagctcaggcagtaattggagtgatagggagtggctgtaaatacagatgaagcccactactcacctcctgctgtgcagtaccagtcggtggtttgagatgcctgcgctagaccacctcttaactgtgaggcaatgttgtaattgacaaggacaccctgtgttcatatatttgattcctcatggtctctaggttttaacacaaaattgcatagtcagctctcttgaaactacttagaaatgctcacttgacacatagtaagctccaataggaaatgactatcatgattgagcacagcagcatgtcttcagtcctagcactttgggaggccaaggcaggaggatcacttgaggccaggagttagagaccagcctggccaacatagtgagctcttgtctctacaaaaaaataattagctggccacagtgcgtgagtctgtagtcctagctactctggaggctgaggcaggaggatggcttgagcccaggacttcaagaatgcagtgtgctatgatcgtgctatggtactccagccttggcaacagagtaagaccctgtcacgaaagaaagaaagaaaatgaaaaccgtgaatatgcacatccataaaagataaactctttacttaatttaaatgttaaccaacacctgctatgccctcgtctattttggcatgacctggtgctttctggcaaatcattgatggcggactccaaaaataaaaagaatcgggcacggtggctaacgcctgtaatcccagcactttgggaggccaaggtggggggatcatgagatcaggagatcgagaccatcctggctaacgtggtgaatctccgtctctactaaaaatacaaaaaaaactagccaggcacagtggcaggcgcctgtagtcccagctactcagggggtgctgaggcaggagaatggtgtgaacccaagaggcggagcttgcagtgagccgagatcacgccactgcactctagcctgggcaacaaagcgagactccatctcaaaataaataaataaataaaaaataaaaagaatgtcaaaaataatggagaaaaatttaagcttgggaagaattccgttcacctgcttaattttttctccattcccaagtaggaaattggtttttgtgaagaaacacgtaggcccagtgtgttgactccattgataaatggcacgatctcattctgttaagtcactgggctgcgatccacactaagcttaccatgaaggtggagagagaaagctagcacatgtggcttcttccttgagttcttcatggaaaagatggggtgtgaaaaggcgggattgaggagggatgggtaacacacatgcactgaatataagatgaagcattgcagttgtgtcacatagacagtaagttcctgaggacctataaactccatccttcttgcatgtgcatcattgtatctccagcacattttctggtgcctggcacatagtagctgctcagtatttgttgaatcaatgaattattagagttatttatagaaaagaacctaccagggtcaggatggatggggtgggttatttgagagaggtggggctttataagcctcgaagaatggtttgctaaggtgagagaagggggcagggatggctttctagccaagaataataaaagcataaatgtaggggtgagaatgggtatgatgagtgtggcaggagctggtttagaggggttgactagtatactgtggcagggagctcagagccagagctcagccctttgctgcctcacaggagttgggaaaatgggagggactttctaagagatacttcacaacatggcaccctcccaagtggaagccaagccccttgagggtatgggaagagaagctgatatttaaaatatgtatcttatatctgcatatgcataaattatgtcatgtttattttttaaattctccccccctttttttttgaggcagagtctcgccctgccacccaggctggagtgcagcagcacgatctcagctcagtggtatgatttctgctcactgcaacctctgtctcctgggttcaagcaattcttgtgcctcagcctcctgagtagctgggactacaggcacacaccaccatgcctggctaatttttgtatttttagtagagatggggttttgccatgttggccaggctggtttcaaactcctgacctcaggtgatctgcccgcctcaacctcccaaagtgctgagattacaggcatgagccactgcgcccggccgtggtttgtttttggaaagatgttacatacaaattcaaaaggtgaacttctcccttcaacccttgtgcattagacccttagcttccctcccaagagacaattatggtttctagtgtatgaggttttctcctagagatatttttgcaagtataagcaaataggtatctattttcttccctaagatttccctacaaatactagcattccatatatatacagtcctatattttgccagaggatgttacatatcagtgcatgtaggaattccttgttcccttttttaaaaaattggtttttatttttgttaaaagtattcatgcagacggcttagagtcaagtaatttttgaaggcttattaagaaaaatagccatcctctgctacttctcaactcctttaattgattttttttttttttggtatttaccaccatatctctgaaaacaacacttgatcattgtgctgctatcttaattttgttttcaattttaggtatcatctattgactttcctccatgaaagatgaaatttagctcattcaccctctggatttgcccctatttcctcgttccaacacacatgcctcatatcagagtcccagtataattttatcttagttttgacaaactcagtgttcagagtttccattattatgactatgtaatgctatctagagtttacattattatgattatgtagatgttattcaaagctgagctttgcactgctttgtgactatttttcttctttctgtatgacttttctttttcctggagttagcaattgccttttttttccccaatcttgttttccatgtatttaaccaccaattctgccccaaaatctctttctaaatgtgttaatctccttttaatatgtccagacatgtattggatatcatattgatatcatctccttgaatgtgatctctactatagccttctgatctgccctggctttctctatagctagtaactgtcatataggatctttttcaccatccttgaaattccccttagtgctttcatagtggattccttgtttcccagttttcatgtcttcctctttcttgctttactctcctgcttaaatcaagcactttgtccagtagcttcccaagaaagaatgtacgtgatcttgaggcattgagaacttccatatctgagaggcttgatgcttctctaacacttaaaggatagtttagttgggtttaaaatttcaggcaagaaagttgttttcagaaagttataaataactttttttgcctgagctttttaaggcatttgtgttgttgccttctagtttcagttttgagaagatgaaacccaatctgattcgtatgtgtgtatgtttgtgagtgtgtgtgtgtgtgattatattcaccttcctggctgggaatattcttgatcctttgtacatgaccagtttttgtttttcctccttctctagaagcttttagactgtctttgtacccctattcaggatgatgggacttgctatgagtccatttttatttgttatcctggacacttagtggcccaattaatctataaacgtgtgtccacaaattctgggaaatgttgcaaattatttcattgatgctgtctttctccctgtgttctctgtttctttttcttagaagtctttttatttccataatggaattcctagaccaatcctataatttaaatctctttcttttgtcattttcatcactttaatgtttttaatggtattttctgggcacttacctcaacttttttccctaacccttccattgcgttttaaatttctggtatatattttattaaattccaaaaattctattttatttttaaatgtttctttcatatgacattctttttctgtggttgcaatatcctgtttctcagaggatatttaatgcagagtctatttcctccaagatacatattttcctaattgttttaacttctgtctgtcatattagtggatttcttcagatgtcttgggattcttggctatccattcatcttggatgctttagtacacaggataccaaattgttgatggaagctcagtgcttataggatgggcttgctgatgtgcttggctataatatgaaagcactgggctaccccattaggacacttctgtttcgtctttcagtcttttgttcatgggctaatctgattcttcagagaaggtttgtagaaaaatcttctgcctggaggttaaagatttgtctagcatcattttgagggtctagttgaaaagaagctgagggtttcaaaatgtgcagtgaaatttgtacattataccttccttctttcagtatggttcctggtgtccccccaggacggagaccctctgtttaaccctcaccagagactaaacccaccaccttctgtggggtgtgagaagggcagtcacttggcttcagggagtgtagaagatatgggaggggtctaacagtgccttatatttgacccagtccttatgtttttgtctcctccttgatcttttcttccagaggcccctggcattgccagtttctgaggtttggggcagaaatggggaattcggtgttgaaattaggtcgtttcccacctttcctcactgctcacctagacttttttcttggtacctttttttttttttttttttttttttttttttgagatggagtttcactctcgttgtccaggctggagtgcaatggcatgatcttggctcactgcaacctccacctcccgggttcaagtgattctcctgcctcagcctcccaagtagctgggattacaggcatccgccaccacacccggctaatttttgtattttaaatagagatggggttcaaccatgttggtcaggctggtcttgaactcccgaccttaggtgatccacccaactcggcctcccaaagtgctgggattacaggcgtgagccacggtgtctggactttttcttggtacttttcaacgcttatcccattttctgtcttccaagatggctttgctgttctcccctctctagttctttttaaactgcctcatgtatttttacactttttggtttgtttgtttttttttgggggatggagtttccctcttgtcgcgcaagctggagtgcacgatctctgctcactgcagcctccacctcccaggatcaagcgattctgcagcctcagcctcctgagtagctgggattacaggtgcatgccaccatgcccagctaatttctgtatttttagtagagacgggttggccaggctcgtctcgagctcctgacctcaggtgatccactcacctcagcctcccaaagtgctgggattacaggcgtgaaccaccacgcccggcctttttacacttttttttttttgccttttcccccctcttttgtgtggagaatggggtcttgttatattttccaggcaggtcttgaactcctgggctccagctttcctcatgcctgtgccttcctaagagctgggattccaggcatgagccaccatgcccggctaaactggttcatgtatttttggaaagtcttttacagttattttagtaaggtttaggaaggaagagagctaaatgcatgcactcagcctaccatcttctcatgggaattctctcatgccttcttttacaaagaagtgataataataatcatggatttttattatatgcttcctataaagctcagggctttacagaaatattctcagttaatctttaccacaaacctacaaggtggacaggaccagattaggaattttaaaattaagccctgaaactattaaggtgcaggcatatgtcataaaaaaaaattaaattataaagtaaagaaggctgacaaaattgtttttgtttttgctttttttagagacagggtcttgctctgttgcccaggctggagtgtaatggtgcgattgtaactcactgcagcctcaaactcctgggttcagcaatcctgcctcagcttcccaagtagctgagactacagagatgtaccaccatgctcagctaattaaaaaaaaacaactgttttttgtttgtttgttttgagacagagtttcacccctgtcacccaggctggagtgcaatggcacgatctcagctcactgcaacctccacctcctgggttcaagtgattctcctgcctcagcctcctgagtagctgggattacaggcacatgccaccatgcccagctaatttttgtacttttagtagagatggtgtttcaccgtgttgaccagactggtcttgaactcctgacctcaggtgatccacccaccttggccttccaaagtgctgggattacaggcatgagccaccgtgcccagtcttttttatttttgagacaggttctcactttgtcacccaggctagagtgcagtggcacaaacacggctcactgcaggcttgacctcctaggctccagtgatcttctcacctcagctccccaagtagctgggactgcagccatgcaccaccacacccggctaatttttgtattttttgtggagacgggatttcaccatgttgcccaggctggtcttgaactcctgagctcaagtgatccacctgcctaggcttctcaaagtgctgggattacaggtgtgagcccactgtgcctagtgaaaaaactttttttttttttttttttttttttttttttagagataagatcttactgtgttgcccaggctggtctctcattcctggcctcaagtgatcctcctgccttgacctcccaaagtgctgggattatgggtatgagccaccgtgcccagcctaaagttgctatttttcccatgatgtttatcttcgtggtgcttatgaaatggcaactatggcattcttccttctcgtgcatgcctgtgtgggtgtgccctcagcatatgcttacaaggtttattgggtgatccaacgctagccgcaagagctattattagctcccttttacagctgggaaaacagactcagaggagtggagaacttgctgcagatttgttaagtgtcagagccaaatatacacttggattatcctgactccaaagccggagccctgctggtcagtcggtgacaccgggcaaccacagggatccccctcaatcccacggaaggctgtctactgtcttcatctcagagtgttgacagctcaaagcttaggaggctggagctaagttcaataaatgaacgtgatgaataggagaaaagcgccattaaagccctccagacaagaaccactttggagcccctccatgggtccctggggtgtaggaggggcaggaaagcagataagattccattctgagcctctgcacttgccctatgcaagatagccacaagtaatgttttgtcctcacctcattagcaacaaatggccacactcaggggattaaaaaaagaaataacagccagcctttatcagcttggggctcttggctaattcctctttaagcttaagacaactctgcgggtggagtgatccaaacgactttctccactttgcaagttcccacactcggctgtatccttctgcttgagattggcagccccctggggatggttcctgctcacccaactcccctgaggctgctccccagtagaggcagagagaggaagggcactgatgtcctcagggcccctgcaataggtcaggacctgggttcactgctccatcaatcccacattgctcggccctcactagcaccacacagggtgggtggcagcctccccatttgatcaatggggaaaactcagcacacctacttggccccagaactgagagtcaaacctggggacccagcttcgctgccctcagaatgttactcttccctcctgggtagcgtggtatagatagtgtagtattcttgtccccatataacggaagaggaaactgaggcccccagaaggctaagggactagcataggccttgtgtcttagcctgttaaggctgctatatcaaaataccatagactgggtggcttttaaacagatatttgtttctcgtggttctggaggctgggaagtccaagatcaagcttggtatctggtgagggcctagtgctgccttctcgctgtgtctcacatggtggaagggacctgctagctctctgggtctctcccccaatgaggattgaacccccatgatctcatcacctcccaaaggccccacctcctaatatcatcactttaggggtaaggattccagcatatgaatttgagggagacatgagcattcagaccatgacaccttgtaatcagaaaggggttaaatatctttggttgaatatcctgtcctgccgattcagaatcactgctgtctataacctcttccctagatcactgttttagatgatgatgataaagatgatattaacggcaattaccaagctcttaaatgtgctgtgggtaaaacaattttaagctctttctgaatccagtctctttcaatcatcttcatgcccttgaaaggtctggatttttgtcgatttccctggtgaggaaacgggccctgggggcagaggtgatagggtggagccaagaagtaattcccagctgtttctctgcagaggcagtgctgctacaaacacatctccaggaaggggtacagccaaatgcttctctgtctcttgtgggttttgcagtggctgtcagctatgtgtctggcccggttgggaatgatgggggactgtgtgtgggaatgaatggctctgtctggctggctcagtctttacagaggtgctaggagtgtctgtttggtgctctgactaatcatgaaaagttcacgtttttatctttattttatttttatttttggtacccatggtgcattacagggaagggagacagcaaaggagaattatttgttataaaatagtaaatattggccaggcacagtggttcacacctgtaatctcagcactttgggaggcagaggcaggcagatcatctgaggtcaggagttcgagaccagcctggccaatgtagtgaaaccccatctctactaaaaatacaaaaaattagccaggcatggtggtgggcgactataatcccagctactcgggaggctgaggcaggagaatcgcttgaacctgggaggtagaggttgcagtgagccgagattgccccactgcactccagcctgggcaacaagagcaaaactccgtctcaaaaaaaaacaaaaacaaaaacaaaaaccgtaaatattaaattgaaaaagggacatacttaagggagtgaacctgaaaagccccagctgacacttggcaacaccttccttgtttgttttgggcttttttgagacagagtctcactctgttgcccaggctggagtgtagtggtgtgatctcggctcacctgagcctcagcctctccaggctcaggtgatcctcccacctcagcctccagagtagctgcatacaggcatgcaccagtacaactggctaatttttgtattttttgtagagatgaggttttgctatgttgttcaggctggccttgaactcctgagcccaagcaatccacctacctcggcctcccaaagtgctgggattataggcgtgacccacagtgcctggccagcaccttccttgttaaattgcatgtgtcagccacctccctcggtgtcctcccagcctctgggcagtctggctccccattcctttctttatccaacagcatttttttgtgagacaaggccttgccctgttgcccaggctggagtggagtggcacactcatagctcactccagcctccaactcctgggctcaagtgatcctcccctctcagcctcccaagtagctgggaccacaggcacagatcatcacgcctggctaattttttgattttttgtagagatgaggtctcattatgttgcccaggctggtctcgaactcctggcctcaagcaatcctcccgcctcggtctcccaaagtgctggaattacagatgtgatccaccacgcccggtcattctaacaatattgattattagatgttgccctagacacagcctactgtgcgtatgtgtaaatacgaattgaatcatcccacaagtagctgctaagtagaggaggtccagagagtggggaagtgtagccctggggaccttgggaggacaggggaggcttccttggaaggtgaagtgtaggcttggctagggaacttgatataggttctatgaggctgctggggctggagcagagagaagggggagaatgtaggaggtaggagtggaggcccaagagggagagcgttggttttcctgtctcctacaccccttcactggccagttctgctttcatgtttttatttattatatattttttgagacagagtttcactctttcacccaagctagagcgcagtggcacaataatagctccctgtaacctcgaactcctaggctcaagcaattttcctgcctcagccttccaaatagctggggctacaggcacacacctctgtccacagctaattaaaaaaaatttttttttcatagagataggggtctcgctttgagtctcaaactcctcgcctcaagcaatccttctgcctcagcctcccaaagcactgggattacaggcatgagctcctatgcccagcccagttctgcttttacaataccagggcttcctgtaggtttggaaaacacctgttgggttgcagcaaaggctctcaaagtatctcttcttactcagcatgtcatcctaaccaactctgccgggagagtagagtggggagatgaaggctggagaaagagaagggccctcacttacagaatggcttaggtcatgggctctggagctgggttcacctcccagctctgccccggctattactttgtgcctcagtttcctcacttgtcccgtgaggatgatgactgtgcttactccagttgttacaagggtgattcggtcagtgtgtagggacacggtgcatggacaggacaagttcaacaggcattagcagtcagctgccgaggacccaccgtcaagggccatgcagtggccaccttcacagtcacaccacagaagatccagaacctctggcatctgcctccgtgcggggcattaggtagagagccacttttctgcaggcaatggaggctgagacctttcttctttactagcccaggggtattgatggccctgcagagacgggttttgattacctctcactggatcccccagcagcctgttaccagaaagaagggcagacgcagggagcctgggtctgtgctcagtccccgctgggttttctccttttatggtcagcctacagtgctctggcttcccagacagaatccaccagcttgtgtttgggcttgggccgaaatagctggtctgtggggagctgggtacctcctgggagtcctcaggcccacagcgggggaggaaccgctgaagccctttatcttctcaggaaacgtgcctggggccttacacatccgaggctgggtggggagtctggggaggaggaagggagagaggcatgtttaaggatggggtgtgaggtgacatgagccccagggatctgggctgggaagctcagccccaggcgggtcctgatgatggccggccgcccccagctccagccttcccagactccacggaggctcggtactgtgtccccgcccactttggagcttctgtcccaggccctctgcttgggatgctctgcctcgacctctccccaggagattctttcacatttttcttaatgctgttcagtggtcacctctgccgtgaaggcttcctgtcttgctcaggtcagtgtgaaaaaacaaacaaacaaaaaacctgacgtctatagcacttgggttcacatccatcgtagcactgctcatctcttacggtcatttctttgcccatctgactcccaccctgggtcatgaacttctcaaaagcaaggataagcaagtcatgaagctcggtgcattggcttgagcctgtgatttcagttacttgggaggccaaggcgggaggatcacttgaggccaggagtttgggaccagcctgggtaatattactaagttaccttactaggccctgtctctacaaaaaaaatgaaaacaaaaaacaaaaaaaccattagccaggcgtagtggcatgcacctgtagtcccagctgctcaggaggctgagatggaaggatctgttagcccaggagttccagactgcagttagctatgatcgtgctactgcacttcagcctgggcatcagagtgacacctcatctcttaaaaaagaaaagaaaaaaaaaagcagatcttattgacttttgtgctttcggtacctggctcaggactcgtttgttgaatgaatatgtgaacacgtgaatatgcattttccattgcttctaccttggttgcctctctgagccagagagcaattcaaaataacaagcatttcctgagcacctactgtgtgtcaggcattgttccttgtaccttcaggagctcattggttcaggggaaaagcattgaaaatgaacaattttgtaattgttggaaacctaatagagctgcatgaagtggaagaagtcagatttataatcattcagaggtggtataaaatgaacatcatttttaaaaaaggtttatgcggtataatttaaataaattcattttaaggatacagttcacacctaaaattgcagctatgtctgcataactgtctaaattcactcataatttacatggttatgcagccattgctgcaatataattttatatttctatcatcccccaaagaaatcttgtgcacatttttttgtcactccatattcctacccgcagctcctggcagccacgaattcacaaatctactttctgtctctatggatttgcctattctggacatttcatataaatggaatcatatgtgaccttttgtggctggcttcttttttttttttttttttttttttttttttttttttgagacagagtgtctcactgcactcgcccgggctggagtgcagtgatgtggtctcggctcaccacaaactctgcctcctgggttcaagtgattctcctgcctcagcctcccgagtagctgggactataggcacgtgccaccacacctggctaatttttgtatttttagtagagacggggtttcactgtattggccaggctggtcttgaactcctgacctcgtgatctgcccacctcagcctcccaaagtgctgggattacaggtgtgagccaccgtgcccagccggctagcttctttcacttagtataatgttgtcaaggttcatccacgttgtatcatggattcatactatttatatattttttaagacagggtctgtctctgtcaccccagctggagtaccgtggtgcagtcgtggcttactacaacctccacctcctgggctcaagccattgtcccacctcagcctcttgagtagctgagaccacagggattgtgccactatgcccagctaatgtttgcatttttttttgtagagatagggtttcaccatgttgcccaggctggtttcggactcccgggctcaagcaatccacctgcctcagcttcccaaagtgctggaatttcaggcatgagccatggccgccggccataacatcctttcttttcatggctgaatactatcccactgtctgggtagaccacattttgtttatccatctacccattgatgaacatttggttgtttctattttttggatattatgaataaagtccataatttttaccaatatggaaaagaaaaacaagaaaaactctgaatgccatatcatggatagatggcctattatcattccatatcatctgtacctttttccgccagaatgttttgagacatttattaagtaaggatcacaatgatgataattactaaaatggagagaacctgtggaccatgggaaccactaggccatgtgacactcatgtttatattagagaaaggcaccgttttctcaaagcacttttcctccatctgctgaaagattattacaataaatacacaatgcaatacaataaatgaccaatgcaaatagtttctccatagagttatgcagtgtacaacatgcaccacggtccatggccatcctgcaggtaggaggtcaagtggaaaggtctccaactcagctctagaaaagtgcagagttagagaaggtatcatagaagagttgactcccaagacgatgtttcagatacagattagggtatgtacccgaagaattgaaaaggtactcaaactaaaacttgtacaggaatgttcatagcagcactatgcagaatagccaaaaggtggaaataacccaaatgtccgtcaactgttgaatggataaacaaaatatgatccatccgtacaatgtgatatgactcagccacaaataggcataaagtctgggacctgctacaacatggatgaacttcagccacatgctgagtgaaagaagtcagacatgaaaggccgcacatgttataattccatttatgcaaaaatatctagaataggtaagaccatagagacagaaagcaaattggcggttgcaagggcttatgggggagtggctgcttaacgggtagagggtttcatttgggggtgacagaatattttagaactagataaaggtggtagttacgtaacattgtgaatgtactaaatgctcctgaattatgcactttagttatttttttatctttattactattttttgagatggagtctccctctgtcacccaggctggagtgcagtggcgcgatctcagctcactgcaaactccacctccctggttcacgcgattctcctgcctcagcctcctgagtagctgggattacaggtgtgcaccaccgcgcccagctaatttttgtatttttggtagagacggggttttgccgtgttggtctcaaactcccgactttaggagatccagctgtgtcggcctcccaaagtgctgggattacaggcataagccaccgcacctggcttgaattattcactttaaaatggttctttttatgtagtgtaaattttacctcaatggaaggaaaaaagagagagagagagagaatggattaggccagagaagaagtggtggtgggtgcactgggcagaagaaatcacttgtgcaaagcaaggagggagtgaaactgctttgtacggtggagaacactgcttttgagtccaacacaagctcaggcttggggaaggaatcagataaaaatttccaggatctcagagttccctgtgctccacacgggttggcagacagcacccacatggagtccttctgctcgtaaccagcaccctgcaagcttcccacgcctggaagtggtgtgtttttgatgggaacgtcaggccagaggtctcccagcagcccccagctcggagccgcgctggcagctcccaggccttctcctggagcccgctccctctcctgggggccctgtgagcatctgagcctataaatctctcctgctctgggcctaggattcacaaggctgccaggaaagcctgcctctctccctgaagtagtggatcaacacagcccatctgtctgtccatctcaaaatctttccttaagatagtggaggttgtctgggccggtcccaggaggttctctctgtctgggttctaatcacagggtacctggttcttctatccttcaccctcttttaaaaaatcactttttagtactttgggaggctgaggcgggcggatcacctgaggtcaggagttcgagaccagcctggccaacatggtgaaaccccgtctctacaaaaaatagaaaaattagccaggcgtggtggcacgcacctgtagtcccagctactcggggggccgaggtggaagaattgcttgaaaccaggaggcagaggttgcagtgagccaagatcgagccactgcactccagcctgggtgacagagcgagactccatttcagaaaaaaaaaaaaaattaaactggtttcccattttgctctgtcctcgagtgaatttctccccctgggtggaagctaaaggcacgggtatctgtctgtctccagagtataatggagagattaaagtttgattgcttttttcctgctttttttttctttgagatggggtcttgctctgttgcccaggctggagtgcagtggcaaaatctcaactcactgcaacctccacctcctgggttcaagtgattctcctgccttagcctcccgagtagctgggactacaggtgcctgccgccatgcctggctaattttttgtatttttagtagagatgggtttcaccatgttgcccaggctggtctcgaactcctgacctcaggtgatccacccacgtgctgggattacaggtgtgagccaccacgcccggcctcctttctcttataaatagggacaccattgatttaggtctcactccaagccaggatgacctcatctcaacatccttcccttaattacatctgcaagacccttattctaaataaaatcacaggtgggatacagtggctcacgcctgtaatcccagcactttgggaggctgaggcaggtgggtcacttgagcccaagagtgtgaaaccagcctgggcaacatagcaagacccaatctctacaaaaaatacaaaaattagccgggcatgctggcatgtgcctatagtcccagctacaggggaggccgaagagggaggattgcttgagcctgggaggttgaggttgcagtgagctgagatcacgccactgtacacccacctgggcgacaaagtgagaccccatctcaatcaattggttagtcaataacatcgcagtctgaggttctgagtgaacatagcttttgggagtcacagttcaacccaccctagtgaccttgggcaagttgcctcacttctgaacctcactctccttatttgtaaaatggaggcaatgccagtgcccaccccaggagctgctgagagaattcagtgggtcacttcaacacagaagttcagcatacgcctgcagtgcagtgagtgctcgggagatcggagctgttagtgggatcctaatgcggtggctctttcttttctgtctttttttagctttgtggtcatgatggtttcataaagaacaataccgactctttttctattgaccatttttggtgggatgaggaaaagattgtatgtgttcatagcacaaacataaccaggatagaagtagaatgggtgaaagtaggtcttcctcctgtcccttttctcaatacttcaggctcaggcctgtttgttggttttttttgtttgttttgttttgtttttggagtctcgctctgttgcccaggctggagtgtagtggcatgatctcacctcactgcaacctccacctcctgggttgaagtgattctcctgcctcagcctccggagtaccttggattacaggtgcatgctaccatgcccagctaatttttgtatttttagtagagacagcgtttcaccatgttggccaggctggtcttgaactcctgacctcaagtgatctgcccgcctcagccttccgaagtgctgggattacaagtgtgagccaccgcacccatcccaggtctgtttttagagatagggtctcactccattgcccaggctggagtgcagtggtgtaatcacagctcactgcaaccttgaactccttggctcaagggatcctactgtctcagcctcccaagtagctgggacaaggggtatgtctatcacacatagctaattaaaaaaaaatttttttttgtagagactgggtcttgctatgttgtccaggctggtctggaactcctggcctcaagtgatcctcccatctcagcctcccaaagtgttgagattacaggcatgaaccactgcatcctacctatatatctgtctttttaaaacacaaaaggtataacactatgctacctcatcttttatttttagcttaatatattttggatatttttctgtgtccatccacaaagctctgcctggttcttttcaatggctgcctattttatttatgtatttatatcttatttgtttttgaaacagagtcttgctctgttgcccagcctggcatgcagtggcacgatctcggctcactgcaacgtccgcctcctgagttcaagcaattttcctgcctcagccttctgagtagctgggattacaagcgtgtgccatgacacccaactaatttttgtatttttagtggagatggggtttcaccatgttagccaggctggtctggaactcctgaactcaagtgatccaccctccttggcctcccaaagtggtgagattacaggcatgagccactgcgcccggcctgcctatttttaaatgtgccattatataaacacaccagaattgaaaccccagagctgactagtctttaggccttttgtcttgaggatttcgttcaaccaggccacccaaacatccatctataatccgagggaagagagagagaactgattggagttgggcatagaatctgaggaacgtgcccacatccaatcagttctctcttaagattacagatggaagaaagagtcatctctttcaccttgccttcttcagtcccatccatcctcccattcatattcccatccatccatccatccatccatccatccatccatccatccatccaactcatttaccggcctatacactctgtcctccctcccattcacccacccatccactctctcatccactcactcatccttccctcctccgtccaaccatccgtccaaccagctatatacccacccatctacccatctacacacccttccctcctttcttctttctttcttcctatctatccatccatccttccttctttccatccatctattcgtccacctacccacccacccactcatccatttgtcttcctgtctctctacctgtccatctatccatccttccatccagccatctgtctgcctattcacccagcctcccatccatttatcctcccgtccatttacctatccatccattcttccatccacccatcctttcttccttccttctttcctttcttccttccttccactcacttgcccatccacctcttcttccatcctcccatccatctactcatctatccatccattttcccacccatctgcccatccacccacccacctactcacctactcatctgcttatccaccctcccgtccatctgtctattcatccacccacccacccatccatctacctacccatctacccacccttccattcacccatctacccttccttcctttcttccttccttccgtccactcatcttcccatccatctactcatccatccctcaatccatccatctaacaagcataattcagcacctaccatctatgtgccagtactagagatacaatgtaaaaccaagcctaggagatttttgatgaaatgaagcttgtgagagctgagcactgaactagtaggactgaagccagggagtggatttaagaaatgcttgccactgtggcattgtctaccagcagatatgatgctgggatttctacattgttaggtgaccattgaacgtattggtaactgttctcagatctctctttgggaaggaaatgggtcttcagagcctggctccacctcagaggcctctttaagagtagaaggtgatggataatgtctgcttaatcacatctagttctttgatgacctctgtatcttttgggtttctctggtggtaaacaagagagactgactctgtcatctagtagaggaaagggatttgtaggggagtatggaggagctcacagttgcagtgggaacactaggaatcaggctaggtaaatgacagaaactgggctgcttgggcccaggggcagaaaggaagtctgcctcagggctctgtccacctgctgtgcttccctgtccttgactgagcttggagttttaggccagagagtctgaccaatgcagcctggaacacattcttacctctttgttgaaggtacttatgaggcagtcccactaagactgtacatgacggtaggggtgatgggggaaacctcaaggaccacaggatgcttctggaagaagaggaaatggatgctggatttacaaaaaaacacaaatgtgcacaatactatattacagatgaaggaactgaggcatggagtttaagaatatttgcccaaggccacagagcggagaagtggctaagggggaccccaatctgtatagatccaacatctgcgtttggtccctaacctaatctgggtggggtgggcctcccgggacacctccagagctgatgtggctggatgctaatgactcctggatcagtcaggctccagcatctttctggggctgcctctgggactttggggctgcccttttggctttggtcgtggcccctgtagcctgggcaatgagcccagctgacctgttgtcacttccaatgaggccagcatggagaagctttagaatgggagggccctgggaggagccaagtccagacccttagctcagagctcattttaattcatggctcttttttcttctttctgtttgcagatcgggaggaccagtccattctatgcacgtaagtggaactgctttttcttctgttttttttttgtttttttttttttttaatctgtagtcgagatccaacctatgaaagaaaagatccatgagtgcagagatctttgatttgttcatggttccaagtgcctctctttatacctggcaccatgtagatgctcactaaacatttgtgatatatggtcttctgcggaggcaggcaaacttaaactcttaatgacacctgctatcatttggttccatacctctcctccttctaaaaaactagcatttattgaacatgtactctgtgccaggacttgaactaaagattttatatgcagaatcttatctaattgcataacagccatctgtgttgatagggaagatgttaaactgtcactttagtatttcacatttatcaagccacaaacacatcagtgccatatttggtgattggtatcactgtttctttgaagacctaggtacataggcagaagatagtaactcaattttagaatcattgagagagttttcactattgtatttatatgcaagtaacatatattaatatatattgttgattcattgacattgaactcacagccagcagctctgtggctgatgcctggatgaagtttatctgatgtgtatttattacataatgggtatcacaactttattgtgcttggaaacatgagccaacacttgagcactatgctggggacatttttgtatgtgtgctgccgaagggagcacatctgaggggacattttaaactgcaaaataactaacaaaaagccacaaaaatacaaaaaaaggtggcactaaatacactacagaaaggacacttgtttacagtatgagagttgaaactagaaggtagagcattcccctgttcaacctgagctgggaacgtgtgcattgggggaatcgaattttccttactctgcacatgttcacaaatgactacaaaagtgccatgaatattgattttggggttacaaataactttcagcaggtcggtgaatttgaaaatatagaatatataaataatgaggatagactgtgcatatatatatttacataatatataatatgtattatatttaatatatttatatttatatatatatatatttgaaggtctggaagcaactaaagctataatcaacagaggttatttaaataaaatatagcatttccaggtagccactacaaagagtgaggctgatctatttatgctgagagagaacgctctttatagataataccgttgagtggaaaacacaggggcaaaccagcatatgcataatgtaaccgtgtgtgtctttaaaaagagcaggattgcatggacgtgcatatgtttcctatttgcatgaaattatctggaaggacaattaaaaactagtaattagaatttcagatggtgatggatggtaggatggcaatgaactgtattgagagaagattgaaacaattaataagtttggggttgatatagatagaaaacctggaaacaataaaacaaaggcaattataaactccaggaaaaaacaaaagttgggatggaaggagaagtaatcacattggactaaggagcccagctgtgcaagtttggagtatttatctaaccagaataactccctgtgatggacttggctctgtggggaaagggaagaggattagatgggaactgaattctcatattccatggtaggatgtacacatttgatgtttgacaatgaatagtctggatctagagatataatgctacctagctatgaggatataaatgctaaaacaacctgccgacttggtttcctagttttctggcttctaggggtcacctgcattccttggctcatggtctcttcctccatctttaaatcctgcagcatggtatcttcaaatctctttctctggtccccctacctctctcttataaggcccagtacctttgtggttatattagccccacctagatgatccaagacagtctcctcatctcaagcaaacatattcacagattctgaggataggccatggacattcttgtgggggctgtttttcagctagccacagaggcatttgatcccctaggagccaaacccatgtgtgagccacatgtcatctccccaggaaccaaaatagtgtagctcaactgccctctgttgagtgaatgaattaagtgtggtaacagagaggtgcaggaaagagtaggactttcagatggcttcctagctatgtagctatgcacgggtcacttgacctctctgagctgagcttatggagaggctgtgaagatgaagaagaggccaccctgctctcatttccagcacccatgccatcagcaggtgctgtttcatctaaaacggtgctatccaaaagaactttgtgatgagcacaaagttcacttaaaagttcacttaattgagctcttaaaaagtggcaagtatattgcagaactgaatttttaagattttagttaatttagatagcggttcctgccttggacggtatgatgctgaaatatttctcatctctgtccattcctctgactccaccgcctcttcctagttcagggtcccgtcacctctcaccagggcctctgtagcagtctcttaagctccctgctcccattgcttgcttgcttccttcctttaataaatatacattataagaatattcactcattattcattgaataaatattcattagcatgctgtcataaagtgtggattccagaacctaaccccttgggtttgaattctggccccatcatcgtctagttagttgtatgctccaggaaataagtcagttcacttctctgagcctcagtttccccatctgtaaaatgggaacaataagcaccccattgggttgttggaaggatgaaatgagtcactacatgtgaagaactgagaaacaggccactgccccatggtgagcactttgtaaggatcagctgctattgtagtgaaagtgctcactattttttaaaaatccttcctgcaatccagtatccatcttgcagtttgtttgtttgtttgtttgtttgtttttgagatggagttttgctctcattgcccaggctagagtgcaatggcgtgatcttggctcacagcaacctccacctcccaggttcaagtgattctcctgcctcagcctcccgagtagctgggataacaggcatgtaccaccatgcctggctaattttgtatttttagtagagacagggttttgtcatgttggtcaggctggtctcgaactcctgacctcaggtgacccggggagcctcggcctcccaagtgctgggattacaggcatgagccgctgagcctggcccatcctgcagtttgttgttgttgttgatttttttgttgagacagagtctcactctgttgcccaggctggagtgcagtggtgcgatcttggctcactgcaacccccgcctcctgggttcaagcaattctcctgcctcagcttcccgagtattatgccatcatgcccagctaatttttgtattgttaatagagatgggttttctccatgttggccagcctggtctcaaactcctgatctcaggtgatccacccacctcagtcagcctcccaaagtgctgggattacaggcatgagccacttcgcccagcccatcctgcagttctgattctccccacactggttctaaagtcccgttcccctcgtgaaatggtttcctgcacccatgagaataaaactcagattccttactgtgacttggaagactgagtgtgatctgctcttccctcttcacttcctgctgtcctcctctgttgtggccctccagccatgctgggagccattctgtctcatacctgggcccagcatttccctcccttggacctctgtccatactgtttgccctgcctggcccacccttccctccatccttcccacagggctctcttgtaactttcaaggctcagcaactccctggcttccccatccacagcctcccctctcctcccttcccctcgatcttctcagtcacatcacccagatgtagcaatgatatctccaccacgaactatcttgattatttgtttacttggctattgtgtatctccatctcctggaatgcagcgttagcaaggacttggcacactgcccacacacagccagtgctggagaaggaggccttagccattgttaggaaggaaatcccaaaacgatcagacttttatttgcaaatgcatccagtcagcccagaaccaccaacatcttcagtctctgtattcaattttattttgcttgttgtgaaattcagccaaagtgacttgaaggacctacaagttgacagcagggctgagcttttacgcgtagttggtgcttaagagaagccaggctggagccaactgtttggttatgcagttaagaaactgaaaattggccgcgcactgtggctcaggcctgtaatcccagcactttgggaggccgaggcgggcggatcacgaggtcaggagttcgagaccatcctggctaacacggtgaaaccccatctctactaaaaaaatacaaaaaaattagctgggcatggtggcgggtgcctgtagtcccagctattcaggaggctgaggcaggagaatggtgtgaacctggggggcggggcttgcagttagcagagatcgcaccactgcactccagcctgggtgacagagcgagactctgtctcaaaaaaaaaaaaaaaagaaaagaaaagaaactgaaaattggccacgcaccgtggctcacgcctgtaatcccagcactttgggaggccgaggcgggtggatcacgaggtcaggagttcgagaccatcctggctaacacggtgaaaccccatctctactaaaaaaaatacaaaaaaattagccgggcatggtggcgggtgcctgtagtcccagctattcaggaggctgaggcaggagaatggcgtgaacctggggggcggagcttgcagtgagctgagatcacgccagtgcactccagcctgggtgacagagcgagactctgtctcaaaaaaaaaaaaaaaaaaaaaagaaaagaaaagaaactgaaaattggctgggtgtggtggcttatgcctggaaactcagggccttgagaggccgaggcgggagggtggctggaagccagaagtttgagaccaaactgaggaacacagtaagaccccattactacaaaaaatttaaaaattagctaggtgggatggtgcatgcctgtagtcccagctactcaggaggttggggagggaggatcacttgagcttgggagttagaggctaagtgagctatgatggcaccactgcacctcagcctgggcaacagagcaagacccagagacaggaaggaaggaaaggaagggaaggaagacaagaaaggaaggaaactgaaagctgaataaatgtaatttttaggcctgagttgtattttgtctagcatgtaatccatccagtataatcagtttaattagaggccatgggcctggctggagatagagctgtgtgatcagggggctaaagtaagaggaggagggtggtttcacataaaattagagagaggtaagggggtgcttccaggccctggggaggagtttaaactttcgtctaaaatggatgacaggctgggcatggtggctcatgcctgtaatcctagcacttcgggaggccaaggcaggctgatcgcttgagctcaggagttcaagaccagcctggccaacatggccaaaccccctctctacaaaaacaaaaattagctgagcgtgatggcatgtgcctgtagtcccagctacttaggaggatgaggcaggaggatctcggttcactgagcctgggaggcagaaagttggcactgagccaagactgcaccactgcacttcagcctgggtgacacagtgagaccccatctcaaaaaatatatataacaataaaataaataaatgaaatggatgagaacgtgctaagggactcaagccaaggaaggacaaagtttaaccagtgggtcaaatcaggcccttgtctgtctgttccagataaagttttattgaaacacagccgcacccacttgtttacgtatttgcttttgtgctgcagtggagagctgagcagatgtgacaaagaatgcgtgaccctcaaagtctaaaatatttactgtctgaccttttacaaaaagagtttgctaactcctagcttaaacagtgggaaaatgtgaatattatttatattgtaatgataggatgaatgctgaaaatcattatacaaacaatatataacttctgtggaagcagtggttataaaagtaataataggtgggcacagtggctcacacctgtaatcccaacactttagggggccgaggcaggaggattgcctgaggcctggagttcaagactatcctgggcaacttagcgagaccccacaaaatcaaaaaattagctaggtgtagtggcacatgcctgtcatcccagctactcaggaggctgaggtgggagggtcacttgaacccaggagttcgagattgcagtgagtcaagattgtgccactgcactccggcctgagcaagaagcaaaactctgtctcaaaaaacaaaagtaataataactaacattttggcataccaggcattgttctaagcattttatataaatgttcactcatttaatcctcataagaatcatataaaaggtcaggcatggtggctcatgcctgtagtcccagcactttgggaggctgaggctagagatcacttgagaccaggagttcgagaccagcttgagcaacatagcgagacccctgtctctacagaaaatttaaaaatcagccagctgtggtggtgtgcacctgtagtcccagctacctgggagattggggcaggagtatcacttgagcctaggaattctcagctgcagtgagctatgattgcatcactgcactccagcctgggccacagagtgagatcttgtctcaaaaaaaaaaaaaaaaaaatcatacaaggtaagtgtttttattatacccattttataatggggtaaagaaactgaggtatggagaggctaaatgacttgcctaaggtcacccaggtaactggcagaggagggatttgaacttgagcaacctggtcctggagcccattatgctattctgccaattgatgctataggggagagaggcgttgcttctgcctggggttttgcaggacgtgtaggagttgtacagtacaaaatgccagggtgctttgccagtcacataaagaccagggactgaatagctgtgaggttcatcagagacaatttggctttcctaccagtggcaaaccacaggctgcaatggacttggcaatattcgaccctgggagccaggaccagctgcagaatttgtagaattttgcaaaatgaaaatgctggctgagtgcagtgactcacacctggaatcccagcactttgggaggctgaggcgggcagatcacatgaggtcaggagttcgaggccagcctcgccaacatggtgaaatcccatctctactaaaaatataaaaattacccaggcatagtggcgggcacctgtagttccagctacttgggaggttgaggcaggagaatcacttgaacctgggaggtagaggttgcagtgagccgccatcacacactgcactccagcctgggcaatagagcaagagtcagtctcaaaaaaaaaaaaaaaaaaagaaaagaaaaaaaatgcagagcgtttataaagaattaggaagaatttccagatggcaacattagagtatgaagcacagggtggtccctgtgagacggtacaggtcacactcatgaagccagcctggctgggggattaagtggccattgggtggttcttcccagctgctggggctggactgattaaaaggacttggcactggggtagttacaaggccaggaggccataacgtggtcatgagtctggtccttctccgggaagagggagctcagtaccaaattccccaagaaataagaaaggagtttagggtgctcagaccaggaaggcatcttcacccctagaggtcaggggtcagaaaagccaagctatgaatgtttctagaaccagctctaagcacatcaaccttcagacgcccacgagcctggagcttgggatgttttctttggcagaacctcccagggcaatttatttttctcaacagaacttggaaacagtggagcccagcagcaacatgggaaggggtagatgcccagagtttatgtcccactccccatcccaggcaaagtgggagaccatagccacggatagggcacattgatgtctttgtttttttttttgtctgtctgtttgtttgtttgtttgtttgttttttgagatggagtctcattctattgcccaggctggagtgcagtggcacgagctcagctcactgtaatctccgcctcctgggttcaagggattctcctgcctcagctccccaagtagctgggactacaggcacccaccaccatgcccagctactttttgtatttttagtagagacagggtttcaccatgttggccaggctggtcttgaactcctgacctcaagtgatccacccgcctcagcctcccaaagtaccgggatgacaggcgtgagccaccacacccggtgatgtctttgttgtaaaagggaggaggtgagagaggttcaaggccagggtggaaaggaaggaactattgtgggaaaggagaagtgagcagcagcagtctaggagcactggtttgtcagcatgaagagtgtgatccacacatgttgtttgtgcacactgctgtcctgattcttgtcttggatctgaataggttcatgaccacctacgcaagtggtttcctacatccaaaaatttctctcctttctcttgctttaatcagaatccaaccccttcactttagaatgaagtcaagcaaggttctgacgttagcctgattgaagtaattcatacttaggtgtgaatgactgagtggcttggttcattgattggggcaagtaaagcctcctggaatatatggcagaattccagtggagtggggctgggacttcactctgtcttttctctttgctgatttgttaaaataaaagggtaggaggcagaacatgggccctggtgtcaagtggacctacgttcaaatcctgcttctcctccatttcctatctgtgtgaaagcaggagcaattgtgggctggagcaatttacttcaaacctctctttgcctcagtttccccggatgggtgatggggataattaataactctctcattagattgctgggtagagtaaatgaaaagatctgtgagcccaaagcctagtactgtgcaggccttcaacaaatatcaattccccttcccctgcccttcttctggccttagaaagcaagtccctagagggttgggcctgtgtcatggaacaacttggtgaaatgtagtaaaaggaattctgactgcattagaatcagagacctgactttccattctgactgtatcccttctttgctgtgtgacctagggaaaattgcttacccactctgggcaagactcttccttctataataacatggaagcaggaagaggataaaggaaataattcatgtagagcatttagcaaagggacccttccccctatatccccccaatgacaaacgccaattcttctctgtcttaagagatgggatcttgctatgttgcccaggcttctctcaaactcctggcctcaaggcatcctcccaactcagcctcctgagtagctgctattataaacgtggccagttctctgctgcacctggccagttctcctcttttacacacacacacacacacacacacacacacacacacacacacatatattctggtcttagtttccccttctggggaaatggggtaatgccttcatggtccccatttcataaactgcctctgaggccatgtgaaataatgtggccattgggaaggaaggcctctaggaagggaagggaccacacaaagtcaccgcaagatgtttcatcattcttggccatcagacacttgatttctggacagtgggacctgtaggattaggcacagcaatttggggcactttttttttctttctctttcttttttcttttcttctatttcttttttaagccatgagccaagttattaatgggcctttggcagagaaaattaatttctttatttcctaattaggaagaagagcagagactgtactagctttggtggcactggttcagcacagagaaccttgggctgacctcggggtgaacaaattcttttttcaacttaaaaaaaaaactctcttatattttagagtattaagtgagctcagaaaataaaagagataaggcaaagaaaggaaacacaaaaaacaaaagtaaactgaaaaatagaagaagacgataaacaagtgaagttttggtcaaggcactgtccttatctttcactaggagtggtggaacatagaggcagtatctggatggagcggttccattgtgatgatttctggtggccaaaacaggcagctagtgcacgaaagccatcttggtaaaaaaaaaaaaaaaaaagatctaccttcatattccaggaggacatacttttttgatacgacaaaccatgtcgtgctgatctaaacatatcagtcatttacactttagtgtgaattacttcaactgggtttattcttagatacttggctgagatcatcagccagcttcctgatacatggggtgggattcctcagaggataaaggggcttgcatctgcccagtgaccaatgggataaccggttttttggtaaatttttctttccataagggagcttcttaaactttaggtcctggtactccagaggcacttacatcctttcttgaaggctgccttgtgcctggtctttccatttctagcaatgctaatgatgtctgcaggcggatcacgaggtcaggagatcgagaccatcctggctaacatggtgaaaccccgtctctactaaaaatacaaaaaattagccgagtgtgctggtgggtgcctgtagtcccagctacttgggaggctgaggcaggagaaccagggaggtggagcttgcagtgagctgaaattgtgccactgtactccagcctggggacagagtgagactccatctcaaaaaaaaaaaaaaaaaaaagtagataattccaaataaacctgtttggacctatgtaagaaaactaaggttttcttgttcactctatttttttagagatgaggtcttgctctgtcacccaggctggagtgcagtggtgtgatcatggctcactgtggcctcaaactcctgggctcaagccatcctcccacctcagcctcctgagtagctgggactacaggcatgcaccaccaagcctggttaatttttcttattttttatagagtcagggttgtgctgtgttgctcaggctggtcttgaactcctggactcgagtgatcctcctgcctcaacttcccaaatagctgggactacaggcatgtgccaccatgcctggctaatttttaaatctttttctagaggcagtgtctctctgtgttgctgagctggtctcacactcctgggctcaaatgatcctcccacctcagcctccccaagtgctgggatcacaggcatgagccaccacatccggcccaccttttcactctttgtatctgaattcttttctatgtcctcttggaaggaatagattgggcattggacctaggctggggacccagttccgctcactaccagagatgtggccttgggcaagttacttcccctctgggagcctctgtttcaccctctgggaaatggtggtgatgatcattattgtcctgcctggctcatggaactgcggaaaggtcaccatggaacgtgtgcatagatgatgttcccgtgtctttcagaggcgagtctggagccgggaaaaccgaaaacaccaagaaggtcattcagtacctggccgtggtggcctcctcccacaagggcaagaaagacacaagtatcacggtgagtggcagttcccaatcagaggccatgatttagccaaccggtctccagcttgcagcccaaccgagatacaaacagaacatcattgcaagaactcaggccccatctgactacccctcccctgaagactcaaagagggaccgtctttttggcgagcaggcctgttgagtgtgggtgatttcttggctcagctagaagcatccctccagaagggggcccgttttgtgaaatgagaataagccctttccttccatagcgagatcttcctccacgtcggggcttctcagtggtggcactgatgtcattttggaccagataactcttccttggaggggcttccctgtggctcgtagaatgtttcacaacatccctggcctcgacccgccagatgccgacagcccccttccctccagttgtgacaaccaaaaatatctctagacattgtcagatgttccctggggtgggacagttgcccttgattgagaagcactcctttcatgaatctctgtaacgtcccaggggttaaggtaccttttgggttcccggattcctccacgtgtccccctgtccctgggatggagatgctggtatcactcggcccgtgggcttcagtgcaatgccattcagtaactgtggattgagcacctactgtatgccaggaaccacttggggtggggacctggggataagtctgagagatgctgttattctcttctctgagcttccagacctgtggaagagcatgtagttgtcaaagaatccctcaaataaacagatgatgacacggtatgactaagagcttgggaggaaaagaagagcaggtttctagagtcatcacctctagggcccatccttctcttcctcctcgtgtgtcagccctgccccatctatcccacaggagggggcacgtggtagggccgctaggactggccggtgcctccgtctgcaggtttgtgggtgggaagatggtaggatggagatctgaccacggcatggggtgtctccagtgttcgccattccagatgtcactttgcgtcctcagaggggactctggggcagccaccatggccggcttgtctggaggcccttggagatctaggatgggcgctggtcgtggctttggagaactttccttctccaaacaaatgcaggaaactcaagattcagcatcctagaattgtctctggcaagttggtttccagccatagtgagtgggaacaatggccccagaggctgtgtggcagtttaaacacagtttccactgccttccctttccctaaagagtaaacacaggagataatactttctaacaactcatcgttatcaagggcctactatgtgctgcttgttttggctgcatgcgtaaacacatctcagacattgtctcactggatactgttttaaggagcctaatgtggccccagtaattatgaaaacctttgaaatgtctggatctctaagaaattagaaaaaggagggaatggctgagcatgggggctcatgcctgtaatctgtgttttgggaggccaaggtgggaggatggtctgagcccaggagttcaggaccagcctgggtgacatagtgagaccctgtctgtaccaaaaaaaaaaaaaaaaaaaaatcaagagaattagctgggcctggtgtgcatgcctgtagtcttagctacttgggaggctgaggcaggaggattgcctgagcccagtaggttgagactgcagtgagctgtgatcgtattcctgcagctaaacagagagaaaagaaacagtatcaaggaaaaggagctgaccagtctgtctgggagactccaggctgtttggggggatcaaagtcatatattctccagcccctgatgtccatgtgatggaaataacgctgacatttgttttatactgtgttgttcaaccacagcaaggcccatcttttgcctacgtgagtaactgagagtgttttcctggtgtgtaggggaggcacggagtgaacttagatctgcatgatcctcttgcacccaccgagtcccgtagctggtggtagaaatggggtaggccctagagtttcacaacttaaatcagtaaatgcaccaaaataccatcctgtgggtgtctgatgccagggaagggtgtgggggtgcatttaccacccacgggacgcctattggagtccccagggttgcgctccagcctgaaatggatttctccggttcagaatgaacccctgcacccttcaaagcatccgctcctggtacccttgactggaacaacctagacagagatgtctgtcccatctggctgagtgttttaggactgtcaggccccaaagcttccctggctcgatggacagtcgatggcacagctgtggcatgcctccctcttctctccctgccatcatccctaagtgtcttccctcagccctgtccctggtgcaccagtgtgtccctgtgcatgcgtgtgcagtgcgtgtctgtctcttgcatgctggttgcttgactcaagcctccagaaacagtcttggaggtcgcgatgcactagctttggtggcgcggtaaggccccagctacgcaacgcataacctggtcctgcttggacctgtgcatatgtaaactcatctctaacacagagcttggggggctgatgtgtgggtcccagcctagaagaaacccacaggtgtcttccttggctcccgaaaagatcattcaatccatcttagttagaccctgggtgactgtgttgcagatcagaaggagaattacagttcttatttgggatctgcttttgtgtgaccttggccgagtcagttaactcctcggggctatggtttcatcatctataaaattgagggtttgaaccaggtcccccgatttaaagctctcttgccaagacttttcaaccttacctgccagaatccccattctagaaagggagcctttttcagagagcatggagaccccaagtttatgtgaacaaaagtgattcctttagtcgtcttcccaccaacaaagaaatgcccgtggtgctccttgtaaatttccaccagtctcagctgtggtgattccacttgtagctgagatttgtatgcggatgaggcttttgcttcatctttctctgggagctacaaaaaggaggatgtgtggacaaatcaaaacagaaacaaatagcagcttcctgctttgtcctgtagaccaggtaccctgatgccttcctagcatgcggaggaatgaggaggaagccatgcccatccttgtcccctctagacactttcccggctcctgtccagcccagccctgatgcctggaaaaataaggaagggaaagcaggaggggaggacaaggagaaaaactcccagaatccagggcctggaggcctcggggcccaactgcagccgccatgttttagggctaggccaagagcagctcgtttgctttcccagcttaacttaccacattggccctttcctgccatgattaatcacgtgaccgcgtttgtgcaaaggcatcccggcagagggggccggtgggctgtgtacagtctcagcttcctttaacccaatgaatggagctcaggcaacctgctttgaagctttattccgcagtccgctaagaggattcctggtgggttttgtgcattccttacttgtctgctgtagaagacttcagaaaaccagtcctgagaaagaaaaaattgcaacttaaaaaaaattgcactaaaataattagaaggaggcttgtagtggtttaacttgaagaaggctgcttgttaaacatgaacagcagcacgactgccatgtacagtgggacaggtggtgcactgcacaactccggggggcaccattcatcatgatgtaaatgacatcaccgacattgtgcaaggcagtggctttgagtggcagtgatgttgcacagatgagcaggccctggtcttgaaaaaagtgaccttcctagggagcagatgtcctagctattagagagctcagacagttgcttctcttctgaaatcctcctgtaaatctgaacattagcatcagggtctaagaggaggtaggagataggagagaacctgtgggttaagggcagagttttgtgacaacatccatccaaggtagaactgtcaggacctaggttgctttctccaataactagatgtgaatgaattttagggagagctggaaaagcagcttctacaagcaaacccgattctggaggctttcggcaacgccaaaacagtgaagaacgacaactcctcacgattcgtaagtagcaaagccacatggattttccagaaaagctttggtgtcatctcctgcctggggctgcagagtgtttgcgtgcagaggtgggaggggcatctgaccctggagagatgggctgtatctcacaatcttgcaagggctcctgcctctcactctctcattcattcattaatttattcactattcactcaacaaatattgattggcctggtgcggtggctcacacctgtaatcccagcactttgggaggctgaggtgggaggatcacttgagcccaggggttctagaccagcctgggcaacaaagcgagatcccatctctattattaaaataaaatttaaaaaattaggtattgagcacctggtatgggctagacccttatatccgataccattttatgtaacaaaacatgaattgagtgccaactgtgtaccaggcacacacctcctccaagaaatacttagtaagtacctactgtgtacaattactctggtaggcacttttacatgtaccaccattctctttgtttttttctcatttgctgtttttattaagtgcctactgtataccaggcactcagcgagtctcacaggattgcgatgaatagttcagatatggttccagccttcatgaagctggttcttccaactgaataacagagagtaagtgaggcagggggtactaccttcccatgcacactcccccaggctccaaagcaaaaagtttttgcctgagcccaacagggcaggggaactctgaaagtggatggttgatgataggtagacaacaatggttttattgtgcaaaagaagcggttgtctccgtaggagggtcagaaagatattttagtgagaaaagatgaaggaaaaattgcctctgcattccaggagaagggggtctctgaactgttgctcgctgagatggggccctgtgaaagactctttgcagaaagctctgctctgctgagcaaatgcacatggtggtccctgaccctgtgatccccaaggcccattttagtaacaaacaattacataatgtctcctttcctcgcccgaaattagaatcatagatagtatcacctcctacacgtattagatgaatacacatcagcataatgccctaactggaatatgaagaagaaataacataagacaattcataatgaaagtgtgcatttcaggccaggcgaggtggctcatgcccgtagtcccagtactttgggagactgaggcgggcagatcacttgagctcaagagtttgagaccagcctgggcaacatggggaaaccccatctctacaaaaataaataaataaagtgcatttcagcatatcaatgctcgggccaggccacaccaacagaagacacagtaagagacagacacttaggtctatccacggcgacagctacaaatacaaggaaaagggtcaagttcaggcactgatgatgttggcatgggattttccagaatggcaactgactctcagtgaagcgctgaaccaaagaacaatcttctctagagtcacacagatgggatattcttgtattagaacaacattttaaacacttgttaatgctttcatttaaaagcataaaaatctagaccaggcacagagtggctcacacctgtaaacccagcaccttgggaggctgagttgggaagatcacctgaggtcaggagtttgagaccagcctggctaacatggtgaaaccctgtctctactaaaaatacaaaaattagctgggcgcagtgacacatgcctgtattcccagctactcgggaggctgaggtgggagaattccttgaacccggggagatggaggttgcagtgagccaaagtcacaccactgcactccaacctgggcgacagagtgaggctcttgtctcaaaaaaaaaaaaaaaaaaaaaaaagcgtaaaaatctaaagtcataaaggttaggttctaagcctggctaattacaaacagatttttacctccatgagtggcaggtgagacattggaagagtcataagggatatagacaaggattggcatcagagactctccaggtcattgcaggactcccaaaatatccttggccccactgttcactaacaacagcggcccccccccaacatgtgacaagccaaataatggcttccaccgatttccaaaatctccatagcagatgtgccgcctccactgagaagcactgcgtttgcatgttccaattctgtgcaatgtttctagcctgtcataaatggaagcacgtgcaagacaaatccctaaaaacatcctccactcactggcgtccctgccatcttgggaaggagagtgaagaaggtgcctgggccttgcctgtgaccagccggctctccctggctccatctgggatatggtcatcccaaatcactctactgcatgtttcccaatggggaaagtttgaaggttttgtcaaggactgagcaagcctaggggattgtgtccacacacgccaacacttcccaccatgttatgtcatgatgggggaaaaggatgaaatcctgtctcacctgttgaggaaacaggaaaagggttcatgccaacagatggaggattgggttccatccttggtttcatggcttagctgaggcaggtagatagggccatctttggagatacttgttgagcctctagggccaggaacatgagccattcctgcctaaaggacatcctacacagggcctgcttgggcagtgtggccaatgcatactcacctgtcccacagaaaaggtttaatccatagttggatgatgtggatgttttggagcagggtggggtctggggagggagccctctagcccctgaatatggaaaaaccttctttctgcttagggccctacctctcaggagcaacgtcacgttggacaagtcacttgatctcttttagccttagttttcccagctttaaaatggggatagtgggctgggtgtggtagtttactcctgtaatcccagcactttgggaggctgaggtgggaggattgcttgagtgcagcagtctgaggccaacctggacaacacagtgagatcctatctctacaaaaaaaaatttaaaaattagccagatatggtggtgcatgcctgtagtcctagctgcttgggagggtgaggtcatggggaaaaggggattgcttgagcccaggagttcaaggttacagtgagctgtgattgcaccactgcactccagccctcgctgacagagcaaaaccttgtctctaataaataaataagtttttttaaatagggatagccatgatggactacggtcattgcaaaagccgaatgaaattgatctgtgaacatgttttacacgttctgttgctgtcaggcctggggtggtttcagctcagcagatgttggttccgcctgacaacttgacctgtggggttctgagtgttcgcaagaatctccccgccccacctcccatcctctgtaccatctgcctcctgcttgcccacagcatggggttaacggctgaagttgggcagcaaagcctgaactgtgttttcctgttggcagggcaaattcatccgcatcaacttcgacgtcacgggttacatcgtgggagccaacattgagacctgtatcctttccctgagcctgggccaaatgggtacccctgccccctaccaatctcctgcccagaggctgggagagtccaagagccacctctatctttccagcctcttaggtttcttccagaacaaatctccccttaacagcaggcattgtggtgcagtggttatacatgtgtggaccggacccctggtttgaaccctaaacaagcagcctaggctgcatgtgatgctcaaatgatctgtcccttagctgagtgaccttgggctggttactccacctctctgtgcctcatcagcaaaatggggatgataatgaatggtacctgcctcatagaaatgtgagaatagagtgaatgaactcatataaagctctaggcaccatgcgaggtgcagagtaagggctggctacgtagtgtctatcgtatgatcttcacttcatccttattcagccattgtccgaggccaaattctggacctgtcgtcctcttagagagttggtctgtgatcggctccacttcttaggtaggaaattgatgaaaacagagtttacccagaagaatgctggtatcgcaaggaacaagtagagcatctctttcatgaacctgagcggtgaagtggagccaagttagaaatttctggacgtgggggaacaaccaggtctagagttcagtgactgatcagcctcaggagctttgcaggcggccctagggctcaggcttcctgtggaacacgtgcttggcaatgtataggacctgggggcctgacttagcttctttctgcacctgaggtcctctagcagcacctagtggtcccatttttccacgttatgtgccctggataagagggtgggttgtggagtagcttcctctccactgtacttgtctaagctgtggggatttgggaaaatcactgaagctctctgggcctcagttttgcctcggtaaaatgggggtgattgcacctagtttctggagctggtgcaggggttaaatgaaataatatgcataataatatgcacagcccttggtacggtactgggcccaaagtgagcatctcataggtggtggctattgcgttaactcaatgttttctacgtttctactttaatctgcccaaaccagccaggattcccatcctgcagctaggagggctgtcaggcttcggtcaagtccagagccagggccctcttgtcctgcagccctgcacacacctctcagcaattcatttcctgtgtttagagcgagccccaggcatagccccgtccttctggcctcagccttccttttagatcagtggttctcaaagtatgtttccaaaccagcagcatcagcatcacttgggagctctttagaaacacacatctcagccaggcacggtggttcacgcctgtaattccagcactttgggaggccgaggcgggcagaccacttgaggtcaggagttcgagaccacctggccaatatggtgaaaccctgtctctactaaaaatacaaaaattatccaggcgtggtggcatgcacctgtagtcccagctactcaggaggctgaggcaggagaattgcttggatccgggaggcagaggttgcagtgagccaagatcacacactgccctccagcctgggtgacagagcgagactctggctcaaacatacgtgcgtgtgtgtgtgtgtgtgtgtgtgtatgtgtgcgtgtgtatacccatgtacaccatgagaaagtctgagaatcactgctttccagattggacatgggctgtggtagcccgggcactgctagctggctttaggacttgaagaagacaaggtctgctgatctagccccatcatcccgcaccatcatgcttagtgctgtggaaatccacccagtacagtagcccagcctcccagctgccctctcccatcaccccggaccctgtgatctccatgccaccctcacctgccctcccctctgctctccctcctgccaccccgcatcgcggagaagctctcctgaaattaattagtgtggcgtgtttacggtctctctcgcctccatcccgtcagaccccactcttggaacagagggcatggaagacagctttgccacttgttagctgtatcatcttgagaaaggacttctcttctctgagcctcagtttccccttattgaaaacaccgataatagttgcacttatttcctagcatactttgtgaggcttcagtgagacaatttatatcaatcatttcacacaggaatgaatcataaatcataggatcatagatggtgtcattatttgtattctgtcatgtctgaagacagctcattttaaagaagatttgctggtgatggctgttaggggaacatctcgttaccattaccttcttcctggagcctttttatgctttttcttttcactctattcccctcccttttttttgcatctgaagtctgctggcagcacccagcggttccatttgtccataggggcaatggtcaaagttagacattaccgatcccaggggtagaactggaaagtcatcccatgtgaattgggtgtgacagggatggaggtggaagaccagaggaacacccgcagtatccccagaatccctaactccctccaaaccagatctgctagaaaaatcacgggcaattcgccaagccagagacgagaggacattccacatcttttactacatgattgctggagccaaggagaagatgagaagtaagtgactagcaatgacatgtgattggatggcttgagccttccctttcatcagaatccggggttaagggattggctattaaaacagtctcagatcctgccagaaaggaccatgtctgtgagtgacatatgaacagttcttcatctcctcccaatgagtgagtgtggcttgtgttcagtcattctcatttactgagcacctactatgtgacatagtagccatcaactccaattagacattagatcattaatgattcatgtctcattagaccagagagcatcaagtccaactagacacaatctacgccttcaaggaaagggagaaagacatttgccttacttgccaatttataaaacttgcaaatataaaagatgcattctggttttataaggaatttgcaggggcagcaggactaagcatttttcattatacatgttttgccagtgactttgtagaacaggggtcaagactttttctgtaaaaggccagatagtaaatcttcaggctttgcaggccaggtggcttctggcacagctattcaactctgccattgtaatacaagagcagccacaggcaatatataaaccaatgagtgcaggcaacacataaaccagtgagctcaggcaacacataaaccagtgagctcaggcaacacataaaccaatgagcacaggcagtacataaaccaatgagcacaggcagcacataaaccaatgaacataggcaacacataaatcagtgagtgcagatgcatcactgtgttacaataaaactttatttacaaaaacaggcagtgtgcagaagtttgctgacctctgttgtagggaaaagtttttttatgtaaatataatacactgtataccaaactccagtaggaagttatgagttctggacctgcagctgtttactaactcttaaaaatatatacaaatcgcatagcttaaaaaaggaatggatcagtgactatctgtacatagtagagtctacatgttagtaataagttttgagtctgaaattctatgggaacaatacagactttgcttcccatctcttttgtggcccaaggttagttattttggttaagacagttaccaaaaggatctgtgtgagctcagaacttcgctgtgtcggagtgtattgtagacctcagctactagggggtggcattatccattatttaaatttccagggtggggcaaagtggctcatgcctgtaatcccacactttcggaggcagaggcgggcggattacctgaggtcaggagtttgagaccagctcggccaagatagtgaaaccctgtctccccaaaaatacaaaaattagccaggtgtggtggctggcgcctgtcatcccagctacttgggaggctgaggcaggagaatcacttgaacctagaaggtggagtttgcagtgagctaagattgcaccactgcactccagcctaggcgatagagtgagactctgtctcaaacaataaaaataagtttccttaatggctggctttcaggaacataggctatgaggtggagcaatttttggtaaagggggaatgctgaatggattttttatgtaccagcaaacatggtatattagcagttacagtgcaggaccctgtggaatgggccagggaaaaatgttgacattccttttccttttatttggcacccaagaaaacagtttggttgtttggtaccttgggttccagttttgtgctttgcctctggtcttccagaaatgggcaagtatagggctcagaactaaattcccaggggccgtttgtattctagatgatagaactggaaagatgttaggcttttagaaagaaccaaatattgctaaatgcatccaaactcgggataatgaagtcttggcaaagacctcaatcctcgtgacttgaatcaggcatttcaagttaatccaaaagtttgagttaactggtgccttcagtcaatttaacctcgagtttatcaagcagcttccaagtgacttgacccataaaagaccttgattttgaaagaaaaatatcttgctgacgtctctccaaaagtataaccgaatccatcctaattaaagattgatctggaagaggatccttgatgtattggagggtataataaaagcaaatggtgcaggagaaagaaaggcaattataaagttgggggtgggggagaagctgaacaacaacaaaggaaatgtaatcataggatacagtttgacacagaatatctaattaatgtcataaaaagggagttggcaaactgtttttgctaaagggtcagtagtaaacgttttagactttaaggaccagatggcctctgttgcaactactcaactctgttgcctagtgagaaagcagccatgagaaataaacaaggacatcagagcagctgtgtttcaataaaactttatttacaaaaacaacaggggaccagatttgccaacctgtgatataagccttatatattgattcaactaaaaatagctgggggtggctgggcacggtggctcacacctgtaatcccagcactttgggaggctgaggcgggtggatcacctgatgtcaggggttcaagactagactagccaacatgatgaaaccccgtctctactaaaaatacaacaaattacctgggcatggtggtgggtgcctgtaatcccagctactcgagaggcaggagaattgcttgaatccgggaggcagaggttgcagtgagcagccaatatcgcaccactgcactccaacctggacaaaggtgaaactccctctcaaaaaaaaaaaaaaaaatagctggaggaaaggaaaggtagtataagaaagctgcatttttgcctaccatagcaggaagtcactagatactatctaaacttgacatatccagaaatcgcctattacagcgattgtgctttgcctctggtcttccaataggccaaaagcacctgttacttttggcactgaggactggtttcctggaagaaaagttttccacagactgggcgggcagggttggggggatggtgtggggatgattcacgtgtattacatttactgtgcactttattattacattgtaatatacaatgaaataattatactagtcaccataatgtagaatcattgggagcttgttttcctgcagtcccatcggggggtgatgggggacagtgacagattatcaggcattagagtgttataaggagggcacatgtgcagctcacgatagggtttgcgctcctatgagaatctaatgctgctgctgatcttatgggaagcggagctcagacagtgatgcaagcgatgggcagcagctgcaaatagcggataaagcttcacttgctcacctgctgctcacctcctgctgtgtggcccagttcctaacatggaccggtactggtctatggcctatgggttggggaacccttggcctatgatatgtaatacataatggtatatacattataataggctagtatatatagcaagcctattgtacagagagatagtggtaactgccagataaaaagcagctaaaagagataaaagcaggtattatggagtaaggtagagttggagaagggatgtgacaggagaatgctatttttcattataaacctttggtagtaattgatttttaaaactcatgtgcctgtttgaatttgataaaaattttataaatacatgaataaggccaggtgcggtggctcacgtctgtaatcccagaactttgagaggccaaggtgggtggatcacctgaggtcaggagttcaagtctagtgtggtcaacatggtgaaaccccatctctactaaaaatacaaaatttagccgggcgtggtggcgggcgcctgtaatcccagctactcaggaggttgaggcaggagaatcgcttgaacctgggaggcggaggttgcagtgagccgagatcgcgccactgcactcctgcctggacgacagagtgagactccgtctcaaaaaaaaaaaaaaaaaaaaaagagtaaaggttgatctaactcttctgacagctttgtctctgaaggctgaaggcagggtgcctctagacaattgaggtaaaggcatcccttcctccaggtaaatgtaacttcgtgccagggattgtggcttagcaagcagaaccaaggctggatatcagctgcagtcactggagcagtgcacaacctgcaccgctgtgtaaggctggcagtggttggtgaggctgtctacgtgacgatgcgtgagggctttaaacggttcaagccttgataaagggaaaggaattatgatggcccagacccttgaccagatctcggtctcatgttgaaattagaagtatgtcttattgaccctgacctgtcttcctctccttctaggtgacttgcttttggagggcttcaacaactacaccttcctctccaatggctttgtgcccatcccagcagcccaggatgatgagatgttccaggaaaccgtggaggccatggcaatcatgggtttcagcgaggaggagcagctatgtaagcctcacaccttgagtctggagggtagcttgcctggataccagtggaacctgttaagaactcttctctggtcaggacagatttctgctctctgaattccccaccttccattaaaaaaaaaaaaaaaaaaggaggaaaatgaattttattctaggtggtttgtttgtgttgtagaaaagtggctgtataactagggttgcaagtaacccgagctggcttaaaccaaagggaaagtgactaactcagaatgttgagaagttcagggaggttaggcacagtggttcaggtctgtaatctcagcgctttgcggggccaaggtgggcggatcactttaggtcaggagttcgagaccaacctggtcaatttggtgaaaccctgtctctactaaaaatacaaaaaaaaaattagccagggctggtggtgcacacttgtagtcctagctactcaggaggctgaggtgggaggattgcttgaacccggaaggcagaggttgcagtgagccaagattacaccactccactccagcttgggagatggagctagactccatctcaaaaaaaaaaaaagttcaggaattcaagcttcaggtacagtgagatctaggtgttcaaaagatttttctagaacctaatttcttgtcttctatctctctcgactacattgtttctctataggatgcagtttgttgacagcaacatagctgggttccagcccttatattctttgggtttatgtccaaagaacagagtagattcccggcttaagttcctgaatggagtgtcattgactctgattggttggcttaggttgatatgcacattcctgagctatgcagcataggcagggttgtggaaagcgcagggtggtttcattatggtccctaagaatggattcttggagctgaaggtagagatgttggcctcatcaggaacatgtgggcagggtttaggggagggggagtgatcgaggcagtggatttactcaggcttttcctggaggggttgctctggtgatcaattgatattgatcaaaatcatccaaccaatggccaagaaacacactgggtcttgagaacaggacagctcagaaagaaattcttggtcgggacactgtgtttccagaaacgattttccttctgcgttagatgtgcctcagtgttgaaggttaatctctttcaggaacaccaggacagaactgtggaaagtttcccttccttcccacgcctacgcccgtttggagccccagaatagcactgaggttgctgaaatgctgcataaggggaggggcagctcctccgaagataacttggggtctggaaaattaggctgtatgggtcagttgacaaatggatggtgtatgtgggtcttggccagggtcccacatcagaatctagtgctgatagcctccttgtctgaatgacataggccctccaagaatgattcatttcatttgggacaggggtcagttttgcttctaatcttgcttttaaataacaatgaacaatggttaagtatttgctgtgtgccaggaatttaccaaatccttttttcttgatgtactacactgttcagtatagttttatttaaataataaaaaactggaacaggctgggcacagtggctcatgcctgtaatcccagcatttggagacactgaggcaagaggattgcttgagcccaggagttcgagaccagcctggataacacagtgagactctgtctctacaaaaaaaataaatagaaaaaaactggaacaaactaaaataggttgattaatagagggtttattaaatcattgtctgtccttgtgaaagaaaacaatgagaccatttaaattgttttgctgggcatggtggctcacgcctgtaattccagcactttgagaagccaaggcaggcagatcacttgagcttgagtttgagactaacctgggcaacatggcaagatcccttctctacaaataatacaaaaaattaactgggtgtggtggtgcacactgtagtcccagctacttgggagactgaggcaggaagattgcttgagcccaggaggtcgaagctgcagtgagccgagatcacaccactctgtcacctaggctggagtacggtggcgcagtctcagctcactgcaatctctgccttgcaggctcaagcagtcctcccagctcagcctctcaagtcgttgagactacagacatgtgctaccacgcctggctaatttttgattttagggtttttgttttgttttgtttgagatggaggcttgctattgtcacccaggctggagtgcagtggcacgacctcggctcactgcaacctctgcctcctgggttcaagcaattctcttggctgagcctcctgggtagctgggattataggcgcccaccaccatgccccactaattttttttgtatttttagtagatactgggtctcgccatgttggccaggctggtcttaaactcctgacctcagatgatccacccatcttggcctcccaaagtgctgggattgcaggcatgagccaccgtgcctggcctggggttttttgttttgttttggtttgatttttggaggggtgggtagagacaaggcttcaccatgttatccagtattctctggtcttgaactcctgggctcaaacaatcagcccaccttggcctcccaaagtgctgggattacaggcatgagccaccatgcccagtccccagtgttctcaatgtactttggcacttgtttcccctttaaccacagagaccagactccaggcccagcaccttcggcagccccaagcatctagctagaatttggtaatactgttttccttgtatttatatttataattgccatctatttatggcaagtgaagatgatttgtcactgaagatagagaaagttttctattaaaacaaatgtaaggaaagagaaggaagtaaatttaaagaaaatgattaagcaaataatggagcagatggtacacagagcaagcattcagacgatggcgtgcaaatgacgaactctcataggaaccaacttagtcctaaatgtacaccaaccccatttataaaccaagagctacttccaaaccctccatcaaggggcctatggagaagggggtgggtcaggcttcaggctggagcttcatgaggctccaagtgaccaggggacaccaggattttccccaccacattgggttctgcagccttgaactcctggcctcaagatatcctcatgcgccaccatgcctggcctggttatactgcttctaatgtattttgaagataaaaaataaaatcacctaaattgtccatcctgtgtatccctggtggtacacatgtctgatgttggaaagtcctgtttcttattcctcagcaagaagagaggtgtaaggccactgtaaaaaattagcacaaacttgatgccttaaaacaacaggaatttattctctcccagttctggaggccagggttctgaaatcagggtgtcggcaggagccgggcataatggctcatgcctgtaatcccagcactttgggaggccaaggcaagaggatcgtttgaggccaggagttcaagaccagcctgagcaacatagcaagaccccttctctactaaaaatttaaaaaaaaaaaatttttttttttttaaaagacaagatgttggcaggggttgttcctcctggaggcactgagggagatctgttccttgcctctgtcctggcttctggtggctctggctgttcctggcttttccttggcttgtctcactccagtctctgcctcatccttcatgtggcattctactctgtgggtcttctcttctgtccatcataaagacacttgacattaaatgtagggcccaccaggttaatccaagatgatctcatcttgagatcttgtacttgattccatctgcgaagaccgattttttccaaaataggccacgttcaggctgggcgcggtggttcacgcctgtagtcccagctctcagggaggcagaggcgggaggatagcttgagcccaggagttcgagacctgcctgggcaatatagtgagaccccggtatccacaaaaaggaaaaaaaaataaatgtaaccccccaaattaggccacattcacaggttccaggtggacatattttagaaagaccaacattcaacctaatataggtggcttccactctttatcacctactaggccaggcccttgctcagcatcttacaagacctaaacttcacgaagcaggtactactgttaccatctccgttttgcagatagggaaactgaggctcatgggacttattgagactcatgtagagtctctatcctctattcatccatgattcatccatcaatccatcctctatcatccatctatcctctactcatccttccatcacccatccatccatcacccatccgtccatccatctacccacccatccatccatgaacccatcctctatacatttatacattcatccatccattcaccctccatctgccatccatccatctccctccctccccatgtgtatctggacccggaactaggatttggaaattcagagataatgagatttataagaagcaaagctgggatttgaactcaggactctctaactgcagagcgcgtgctttgcaccagcacaccaggatgctgccagccgtcaccacccttgctgtgttgtgtctcctcactggtttacttctttgctgtctgctaattctgccccaaggttcatctcttatggcctgggagtggtggcattcttttgtcatttctggaattacatttaactataccagaaagtgcaaaccaatggttcctgagcccacaggagagatcggccactacaaccttcaaaatttttagaaattggttcctaaagtttaaatatgggtaggccgggcactgtggcctataatcccaaccctatgggaggccaaggcacatggatcacttgaagtcaggagtttgagaccagcctggccaacatggtgaaactccgtctctactaaaaatagaaaaattagccgggtgtggtggcacacgcctgtaatcccagctactctggaggctgaggcaggagaattcccctgaacctgggaagcgcagaggttgcagtgagccgagattgcaccaatgcactccaacctgggtgacagcaagactcagtctcacacacacacacacacacacacacacacacacacacacacacaccaaaaaacatgggtacacttcacataaaaactctgggtttccattatctagaaaaatcagaagttccagcaacacttggcttatatcccctgtggcaatgacggagtagctgctggccccttcagatgggtttgtggcctccttgggtccccacagtcctcattagttggctttgttcatttagaccagtggttctctgccagaggtgagtttgcctcccaggggacattgagtagtatctggtgacatttgtggttgtcacaactctgtcagggtaaccaccactgacatctagtggttagaggccagggatgctactaaacttcccatgatacccaggacagctccccacaatagagaattatctggcccccaatttctgcagtgacaagattgagaaaccctgagttggccggctcgcctgggctgtgcaggcatttcaggaatctttagtttaaattgacacttttaaaactgtgagtgcaactcttcatagtttacaaagactctttcatagatgttatggttaaaaggaagtgtgtttccaagccctgtcaacagcagcttcattcattttggggagaaggctttctaccatagtaagtgggagcaaatggatgggtggtcagcagctgggtccttttgctgagctgggccagggaccccatggcgtgagaatagctgttgtgaagggccttgtaatgtctggtttggcctgaggaaccagagaagtctgggatctctaggctttgttcctggaacatagtgactgatttgaagccagaactctgggtgatttgtacctgagttaagctaagccaagaatttgcattaatcatcatccatccattcatccatctaccatccatccatcatctgtccatccatccattcatccatccatcatccatccatcaatgctgtatccattcctccatcaattctccatccatctatccatcgtctatccatcaatcctctgtccattccatctatccatctatcctctatccatccatccatcatccgtctatcctctatccatgaattattcatccatcaatccatcctctattcatccatctatcctctactcatccgtccatcattcacccattcatctacccacccatccatccatccgtccattcatccatgaacccatcctctatccatttattcattcatccatccatccaccttccacctaccatccatccatctctctccctccctcccatgtgtatcaggaccttggaataggctttggaaattcaaagatgattagggcaggccctccactctccagaaactcatggtcttatggggatttcagacatagaaactattttaacagtaacatggcctgagtatggagtcagaaaggttccaagtattctgggaacacagcgtttttgtttggagacacctggacaacaagtggaaacaaatgtatatcttcttcatcccaacatgggcatctgttacacccagaagagtatgtaagaagcacagggtttttatttcaaaaatccttttattgacatatgatttacatggagaaaattgtgtatgccatagcgtgcagtgcaaagaattattataaactgaacacgtctgtgtaactagaatccattttaaataagacaatgccaccagccccatggaagctcccacatgcaccttctaagaacttccctcaattaaggataatcattatcctgacttctaacagcatcgattagttttgcctcttcttgaatggacggtctatatatggacttagacagtatgttcttgtttccatctgtcctcttttgttcggtatttgtgtctggaagatatgtcagggttttttttttgttttagagacaggatctccctacattgcccaggctgtatcaagctcctggcttcaagcagttctcccacctcagcctcccaaagtgctggggtcgcaggcatgagtcactatgctggccccaatacatcagttttgatttgtggtagttgtagctcattcattctcactgttctgtggcaggggttgctaacacatttttctgtaaagggtcagatagtaaattctttagcctttgtaggccagacgatctttgttgcaactcattaactctgccagtgtagcatgcaaatagttacagacaatatgtaaatgaatgagtatagctgttttccactaaaactttatgtataatagcaagcagtgggccagatttggtccatgggctgtaatttgccagtccctgctgcgtggcattccattgtaatgcaaggttttaagcaaccatatgaaaatattgagctcagaatctagtttcttcagaggaaagatgtaagctggctctgggtccccagtggctttaggctccaaaactccagggtaccttggcattgacctttgtgtctgctctgcccttctctccccacctcagccatattgaaggtggtatcatcggtcctgcagcttggaaatatcgtcttcaagaaggaaagaaacacagaccaggcgtccatgccagataacacaggtacttgccactttttcctgatgaccaatgactttggggttgggggggtgggggaggtgacatttaaccactggttatttttcaaggtgaaggtatctgggattttaacaacagttggactaggttcttatcactcactttttcaaacttttcagtgctcaagaccctatgtggaaagttattgaatcagagcgcagggattaaaaaaaaacaaacctaatagttttatttatttgttcttttttttaaatacaaaattttacaagttttaatagagacgaggtctcgctgtgttgcccaagctgatcttgaactcctgagctcaagtgatcctcccaccttggcctcccaaaatgctgggattacaggcaagagtcatcacgtcctacccctaatagtgaccagacaagatcccgagggaccatctcttctaaaataccccacttaattgttttgttaaagaaatatttctcaagcccctgcaatatgccactgggatacagcaggaaatgacacaagaatagctcttcttacggtatctgtggtcgtcttggggagacagacctcaattgccctgagaattaggggtgccagataaaatacaggatgtccagataaatttcaattttaggtaaacaacaaacctttttttaaattttaattatgtcccttgtaacatttggaccgtgattataccaaaagagtattcttgtttatctgaaattcaggtttaactgagcatcctgtaattttccccctaaatctgataaacctacccacaaataaacagtattttgtgttttgagaagctggcctggctaccactatgcttgttggtggctgagctgagagcaaaacttaggtttcttatttcccagcccaggctgtatattgtgttgctttttcccgctccctagagcccaccttgatcaaacctgttgcaaccgcttactgggtttaccttgcccacagcctagacagagccaattaatcaagacaggggaattgcgatagagtaagagtaactcacgcagagccggctgcatgggagaacagagttttattattactcaaatcaatctccttgagcattcgtggatcagagtttttaagcataatgtggttagggggaggccagtgagttgggggtgctgattggttgggtcagagatgaaattacagggagtcgaagctgtcctcttgccctgagtcagttcctggacagaggccataagatcagatgagccagtttctcgatctgggtggtgtcagctgatccacctggtgccagggtccgcaaaaatatctcaagtactggtcttaggttttacaatagtgatgttatccccaggagcaatttagggagggtcagactcttgtagcctccagttacaggactcctaaaccataatttcaaacctttgggctaatttgttattcctacaaaggcagtctagtctccaggcaagaagggggtttgttttgggaaagggttcttgtgttttaaactataaactaagaggctaggcgtggtggctcatgcctgtaatcctaggattttgggaggcccaggcaggtggatcacttgaagtcaggagttcaagaccagcctcgccaacatggtgaaaccccatctctactaaaaatacaaaaattagccaggcgtagtggcaggcgcctgtaatcccagctactcaggaggctgaggcaggagaactgcttgaacgcaggaggcggagattgcagtgcgccgagattgtgccactgcactccagcctgggtaacagagtgagactctgtgtccaaaacataaaaaataaactataaactaagttcctgccaagttaattcggcttacacccacaaatggttcagtggagcttggaggttagaagcaaggtggagtccgttaggtcagatcttgttcagtgtctcagttataattttgcagtggcagtttcattctcaggtgtttgttatgtattagagtccctaaatctggcaaattaatggaatccggatgccaaggaaagacctcagggaaagagaaatgaaaaagtgctcttgccaagagatggggaaaaaaaaatcctaaaatcactctatttactctgccttgcacatgcaaagcagcatgtaatgctattttcatgttaagggaccagctcgtggtcacaccactgcacttcagcccgggcgacaggaagactgcatctcaaaataaaagaagagcatttaggttgactctagcattttgctattgcaaacaatgctgcaacacatatcctagaagggtgaaagaaatatttattgaacagtaactgttcaataaatgttactattaataactatttaatacttactaagtaactgttaaataaatctcaagggccagtggctcacgcctgtaatcccagcacttagggaggccgaggtgggcggattgcctgagttcaggacttcgagaccagcctgggcaacacggtgtaactccatctcaactaaaatacaaaagaaattagctgggtgtggtggcaggcacctataatgccagctactcgggaggctgaggcaggagaattgcttgaacccggaaggcggaggttgcagtgagctgagatcgcgccactgcactccagcctgggcgacagagcgagactctgtctccaaaaataaataaataaataaacaaataaataaataaataaatctatctatctcagggactttacatactttaccttatttagtcctgggtaccaacaaggtaccgaagagctgaccctttttaaagctgagaaaagcaagatgctgggagggtaaagagcttttccaaagtcacatgacttggaagtgtgaagggacagggacttgaaactagaactacctgaccctaaacccccaactggggcctgcttcagcccaccccaatcattgcctctcagcaaaatactggggagtgtgaccactaatgacagcagcctttaggacacttcaagctatattcatggtcagcgggtcccatttccccaagagaacccgctgtattcacagatcacaaatatcccatgcgatgtgtcttcttgccaagctatttcttttgtgatgcactcacgatgtttcttttctccatccagctgctcagaaagtttgccacctcatgggaattaatgtgacagatttcaccagatccatcctcactcctcgtatcaaggttgggcgagatgtggtacagaaagctcagacaaaagaacaggtaatgatgtacttatcacttatccatccatgcacccacccatccatccattcatccatctatccacctgttcactcattcatgtattcattaatccattcacccatggtctgcctctgcatctgtccatccatccatctttctacccactcattcatctgtctgttcatccatccatccatccatccattcatctgcccatctatctgctcacccatcatctctccatccctcactcatccatctgtccatccatccatgacccagccatctgtccatctgtccgtccatccatcacccatccagctgtcattccattcattcattcattcattcatctgtccatgcatccacccatccatctctttatccctcatttattcaatactagaatattcacagtcccatgtcaggttttgtttgtttgtttgttttttgtttttgagccagagccttgctctgttgcccaggggggggtgcagtggtgccatcgcagctcactgtagcctctgcctcccagattcaaacgattctcctgcctcagtcccccaagcagctgggactacaggcatgcaccacaacgcctggctaatttttgtatttttagtagagaagggtttttgccttgttggtcaggctggtcttgaactcccgacctcaagtgacccacctgcctcggcctcccaaagtgctgggattacagtgtgagtcactgcacccggccaagaataaaaatcttcaccaccagcctggcttatgtgaaaatggagcccattgagaataaccgggttcccctggttgccctctgcaggctgactttgctgtagaggctttggccaaggcaacatatgagcgccttttccgctggatactcacccgcgtgaacaaagccctggacaagacccatcggcaaggggcttccttcctggggatcctggatatagctggatttgagatctttgaggtacagctcggtgggatcctaagagccatggtcttggttgtctgagatgggctttttcttggaggagtcatgattttggagaaaggcatgtagatggctactgtagggtaggaggctgtctagttaagggtggatcattgagggtataagagacagaaatccaacaggaaatgcattggtttctggaactgagaaggccagacatgtagctggatcccgtaggcagggtctgatctcccgccatcgttctctctctctctctgccttcctccatattggctccattctcaagcaggctctcccctcacgggggcaagatggctgccacagctccagactgcctctcagtaatcctggtaaaaaaaaaaaaaaaaaaaaagcacatatctcttttctaacagttccaaccaaaatcttggaattaagtctcactgactcttactcacctgaattgggctacatggtcacctccaagccaagaactgtttgcaggagcttgcaatacctcatgtagtagaaacatggatattggatcctttacccatgggtttgaagaaagttctcagagaaagggaaggttttttttttgtcttgtcttgtttttttttttttgagacagagtcttgctctgtcgcccagactggaatgcagtgtcacaattttgtctcactgctgcctccgcctcctgggttcaagcaattctcttgtctcagcctcctgagtagctgggactacaggagtgtaccactgtgcccagctaattttttttttttttttagacagagtctcgctctgttgcccaggccggagtgcagtagtgcaatcttggctcaccgcaacctccgcctcccaggttcaagtgattctcctgcctcagcctctcgagtagctgggattagtgccaccatgcctggctacttttttttttttttttggtagagacagagtttcaccctgttggccaggctagtctcaaactcctgatctcaaatgatccaccagcctcggcctcccaaagtgctgggattacaggtatgagccactgtgcttggccaatttttgtatttttagtggagagaggtttcgctatgcttgccaggctggtcgcaaactcctgacctcaagtgatcctcccgccttggcctccctaagtgctgggattacaatcatgagcactacacccagccaggaggttttaagattgatagatgtcccgaaagaagtgtactaccgagtcactttctctctgcgcctctgttttcacatctgtaaaatgtttccacatctgtacatgcagtagcgtgccttacgaggtttgtccatccatagatggttgtgcagatggaggagataagcatctttaaggtgtgtgagggccatgtgatatcaacttcaccagccctggtggactctaggcagcatgttttggggcctcagccctgtctgggtgctgggatggcagaacaggatgtgggcgggccatgggggcgctgtcgggtggagcttctgtggggctccttgtcttctgacttcataccaagatgctcacgccccgcccccacgccatgtgctcaggtgaactccttcgagcagctgtgcatcaactacaccaacgagaagctgcagcagctcttcaaccacaccatgttcatcctggagcaggaggagtaccagcgcgagggcatcgagtggaacttcatcgactttgggctggacctacagccctgcatcgagctcatcgagcgaccggtgaggggcacgtgggcgtgcggggctccgtcacaccttgtacacgtgtgtggcctctgtggagccgacgtggaccccacactctccccatgcacatagcattcccccacccaatccatcacccagtcctgaaaggctgtaagctgaatccttgtgaactcttacaatttccattaacccacattttcatatcaaaggtattttctttaatttctgccttccttccatcctcttttttcttcctttttttcttccctaccctctttcccttccctttccttctctgccattgctttttttttttttttttttttttttatgacatggtctgactctgttgcccaggctggagtgcagtggcacaatcttgcctcactgcaacctccacctccctgcctcaagtgatcctcccgcctcagcctcccaagtggctgagactacaggcgtgcaccaccacgcccacctaacttttgtattttcagtagagacagggtttctactaattagccgggcctggtggtgcacgcctgtggtcccagctatttgggaggctgaggtgggaggattgcttgagccctggaggcagaggttgctgtaagccgagattgcgccactgcattccagcctggataacagagtgagaccctgtctccaaaaaaaacttttctaacaggaaccctaggtgaattcaagtcaagcaacaaattcatttgcaagaattatgaactcggccgggcgcggtggctcatgcctgtaatcccagcactttgggaggccgaggcgggcggatcacgaggtcaggagatggagaccatcctggctaacacggtgaaaccccgcctctactaaaaatagaaaaaatcagccgggcgccgtggcaggcgcctgtagtcccagctactcgggaggctgaggcaggagaatggcgtgaacccaggaagcggagcttgcagtgagtcgagatcgcgccactgcaccgtctgcctgggcgacaaggcaaaactctgtctcaaaaaaaaaaaaaaaaaaaaaagagttatgaactcttcatgatgttgcctgcgtgttgcccactagggggcggcagcaaacattatgttctgccttccatccctgttactggtccattgggcacagggtaatttgaaggtagatttggaagcatgggggtcataaactcatctttatatgtgggcaaatacagtatcagatctcggcggatgcccatgcgttgtgtatagttggccagctcttcatggaatgcctgaggttgggtgttctctctgattcaagccctacttgtctcccacagaacaaccctccaggtgtgctggccctgctggacgaggaatgctggttccccaaagccacggacaagtctttcgtggagaagctgtgcacggagcagggcagccaccccaagttccagaagcccaagcagctcaaggacaagactgagttctccatcatccattatgctgggaaggtaccagccacagggcccaggggactctgtctcaggggacccccagtggctgctcagcgcagagacagtctgagagtggcagaaccttgggctgcctggaaactgcaaagccatctgctgctaagcgaatcccaaccaagtcctattcgtaatttgtctacgcatctgtaaggcatcagctgtagccactctcatgttttccaaccgtgacgtccagacagttatttctttctgtttttgttggagacagggtctcgctttgtcgcccaggctggagtgcagtggtgcgatcatagctcactacagcctcaacctcctgggctcacacgatcctcctgcctcagcttcccaagtagctgggactacaggtgtacaccaccatgcccagctaaaatcttttttcctttttgagatggaattttgctcttgtcatccaggctggagtgcaatggcgtgatctctgctaactgcaacctctccctccgggttcaagagattctcctgcctcagcctcccaaatagctgggattacaggcacctgccaccacacccagctaatttttgtatttttagtagagaagggtttcgccatgttggccaggctggtctcaaactcctgacctcaggtgatccacccgcctcggcctcccaaggtgctaggattacaggcatgagccaccgtgcctggccgcccagctaaatttttaaattatgtatagatatggggtcttgctgtgttgcccaggctggtcttgaattcctgggctcaagagatctccctgcctcggcttcctgaagtgctgggattatgagcacgagccactgtacctggcctcagcctgcttttcttgtatagactctaaatccttcctgctacaagttatacccaacaggcggggccaactggaatggggtgactaatacatccacacctggcttcaacaaaaatctcccatgtcacggtcttgagtttgctattgccagcctgctctggccagggaaatctatgatagttgtattcatcatcatcatcatcatcatcaacatgccttggctgttattgtataggcccttgccctgtggctctcaagagtcctggataatgtacaaaggacatagcttagtctggcttgcagaattgtagtattctattgactcctcagtacctccactgcatcatgggcacaaacaatgctctctaccagggcctggcaacagagtccgatctggcccacagcttgttattgtaaataaagttttattggaacacagccatgcccatttgtatgcataatgtctatggctggctgcttttgtatactacagtgctagagttgagtagctgcgacaaagactgtatgacttggctgggtgtggtggctcacgcctgtaaccccagcaccaaggcaggtggattacttgaggtcagcagtttgagaccagcctggccaacatggcgaaagcccgtctctgctaaaaataaaaaataaaaaaaatttaaaaattagccagctgtgagattacaggcacacaactgtaacctcagctactcaggaggctgaggcaagagaactgcttgacccaggaagttggaggttgcagtgagctgagactgcaccactgcactccagactgggcaacagagaaccactctgtctcaaaaaccaaaacaaacaaacaaacaaaacattgtatgacttgccaagccaaaaatatctactatctgggccttcaccaaaagtttcccaactcctagcctatattcaagggggtatatgttcctttaagcatatagagacaacacttttcttttccctacttcatcagtggattttttttattattattttcagtcttctctcagatcaagcctacctattatcctgataacccacatcccatgataacccagcaaagctgtattatcagttcctttcatttaatattcaccatagtaaaaattacggctttgggcattgtcattgtttgagtcaggaatgtaaaaagcctatatgtcctttttctgtatatccatatatcaggatctctgagttacaaattatgctcattagagagtggaaaataggatgccatgcttaattaatttatttatttaattattttgagacagagtctcactctgtcacccaggctggagttcagtggcgcaatctcagctcactgcaatctccgcctcccaggctgaagcgattctcctgcctcagcctcccgagtagctggcattacaggtgtgcaccaccatgcctggctaattttttttttttttttgtatttttagtagacatggggtttcaccatgttggtcaggttggtcttgaacgcctgacctcaaatgatccacccaccttggccttccacagtgctgggattaccagtgtgaaccaccacgcttggctgccatgcttaatttctaaaccaggatgattgggaagatgatgaggggggagttttgcatgtcggcaggagggcatctgccgtcatgaaatctcttaatagtgtataactcacaggtactgtgctggcttaggaggagggaggctaccacagcagcgttagtaggagaatatggaatggaaactaggctttcccagcaatggctatcactggctgatgtcctactacgtgggcacaggtccctgggctgttggtctcttcactggtgtttgtggagtcccatcatggtggtcataaacgtcatttcctctctgacctcagaagatctggaaggacaatgggagggctggggtcctggccttggtttctaagtttctagtttcccaggggttctgaccagcagggtgtccttggcaggtggactataatgcgagtgcctggctgaccaagaatatggacccgctgaatgacaacgtgacttccctgctcaatgcctcctccgacaagtttgtggccgacctgtggaaggacggtaaggccttctctgctcgggtccatgttctgctttgagctggagaattgaacacccaagtcccccgactctcacacctgccccaggaggggaggcctttacatgggggcaggggaaggaagagcattggcatgggctggtgatgtctcgttgaaacaatttcttcctgagtgggggtccctgagcccctcaatcctacatgtcccgaggggattgaggtcctgaggtcagggctcaggcaatagaggagaaacagcatgccaggcacggggagttagactgccctgtccagagtcagaaggacttcactgtatcttgtctctgccacctcctagctctgtggtcttggatgagtcacttgatgtcattaagcttcattgtcctcattagtaaaacaggagatgcaataatagttgccgtctctactagaggtattatgagggttaaattagaccagtgatgctcaaactcaagcaggcatcatgaccccctggaaggctttgtttatttatttagggacagagtcttgctttgtcacccaggctggagggcggtggtgcaatcttggctcactgcagcctccaccttctgggttccagtgattttcctgcctcagcctcccaagtagctagcattacaggcacacaccaccatacctggctaatttttgtatttttagtagagacggggttcccccatgttggccaggctggtctcaaactcctgacctcaggtgatccgcccacctcagcctcaaaaagtgctgggattacaggtgtgagccactgcacctggccctctttggagggctttttaaaacccagatggctgggcctaccctaagatctaattctgcaggtctggggccagggatggggcgggcctgaaaacattcatcccaggtgatgctgctggtctagggaccacactccggctccctttgagaaccagtgaatagatgatccctgtgaagagctgctggagtgatgatgaggggagggggtttgctgtttgtccctggccatcagtgtccacagcaggttttattcttggcacagggcccatgggcctggggcttacaggactggtctccccttgttttaagcatgctaaaaaaagggctccaggaggggccagctgtgccctaaccatatgccaggctctgggcctagggaacaacatcgcaccctgggtctgtgtcatcccaggacacatgatgaagcctgtagtccctcctctgcgggacccacagtcttgtgggagagatgagactctcaaagacaagcagagagacaagcatgaggctgcgcatggtggctcacacctgtaatctcagcactttgggaggctgaggcaggaggatcagttgaggtcaagagttcgagaccagtctggccaacgtggcgaaaccccatctctactaaaaatacaaaaactaactgggcgtggtggtggtaatcccagctactcgggaggctgaggcaggagaactgcttgaacctgggaggcgcaggttgcagtgagctgagattgtgccattggactccagcctgggcaaaagagcaagactctgtcttgaaaaaataaaactaaaaataaaaaataaaaacaaaattagccgggtgtgctggtgggtgcctgtaatcccagctactcaggaggctaaggcaggagaatcacctgaacctgggtggtgaaggttgcagtgagccaagatcgtgccactgctctccagctgggcgacagagtgagagcttgtctcaaaaaaaaaaaaaaaaaaaaaagattgttacacagaatctgagtagaaggtgaagaaatggtgccatccatggcctgtgggttgggcttggcatgtgcaggacctgctgggctggtagaaaaagaaccttggaggtgatgatgatgatgatgatgatgatgatgatgatggccgggcgcggtagctcacgcctgtaatcccagcacattgggaggccaaggcaggggaatcacctgaggtcaggagttcgagaccagcctgaccaacatggagaaactctgtctctactaaaaatataaaaaaaatgagccgggcgtggtggcgcatgcctgtaatcccagctactgggaggctgaggcgggagaattgctggaacccgggaggcggacgttgtggtgagccgagatcacgccattgcactccagcctggccaacaagagtgaaactccgtctcaataaaataaaataatgataataataataataataataataataataataataataatacctactttttgttgagcacttactgatgtgccaggctatctcggagtgtgtgctgtatcttctgcctcagaatatttcttccgtggatacctacatggttacccactcatttcttgctggtttctgctcaaatatcaacttagcagagcccaccacctccttgtctaagagagcaccctcttcactctctctccgctttaccctatttttatttttctacgcacacctcactactcaagatattccatacttaacatctgtgatctctgtctgtctccttccctgtgatataagcggggtgagggggccgggtctttttttgttcacagcagtgtccccagggcctggagcacagaaggtcctcaataactatttgttggtggatgaaagattggaggctggcagggaataagtgccttctgtgccttatttttttttacccctgccctagaaggtagacggtattattacctcccttttgtagaaagggagactgaggcacaggatagtgccaagccaaggctagtcagtgagtggacagcgagagcaggcttgactcctaggtcagcgtgactccatcacagggaatttgttctttctgccactcaggtgctctcaggatttccccaatagacaatacttggaaaccctgactgccgaaggaggcgttggtgatggaaggaaagattggagtgggcaggttggtgggtggggctggggctgagcctctggcctatttaggggtgggtgggccagaggctgatgccaccctggctgtgccccatagtggaccgcatcgtgggcctggaccagatggccaagatgacggagagctcgctgcccagcgcctccaagaccaagaagggcatgttccgcacagtggggcagctgtacaaggagcagctgggcaagctgatgaccacgctacgcaacaccacgcccaacttcgtgcgctgcatcatccccaaccacgagaagagggtgaggcccgccgcccagaccctggggctcccagaagccagggctgtcccaagcggtcacagcgtccccagggcgccctctgcccccacctaccccgaggaccccattttccatgtggggaaggctatctgaatctcagacccattccccatccctggaggaaaaggaggaagggaggatgcatccagagacttttcagttgtggagttgctgtgcaggtcatccagccactcattcattcattatcccaggaagtattcactgggctctgccctgtcctgggtgctggggagcagtgttagaaaaattgtagcccttccctgtgggtttctcataatctggtgcaggcatcttcagcttggggcgattgtgtcctctatatggacatgctacagacatttttggttgtcacaaccaggagggggctgttagtcagcatctagtgggtaggggccagggatgccctaagcattgtacaatgcacaggatggtccctcaacccccagcacagaatccctacaagatgccagtagtgctgaggttatgggagacacggggagaggtaaacatacagctgatgatggtgatggaatgtggtcagttaggagaacaccaaagagccagggctcctcccacagcctcaggactcagagaaagcttctggtgaacttgaacgttaagaatgtgtggccatcaacttggtgacatggaaggcagggtggggcctaggataagcagggggcctaggataagcagagggcccaggctaagcaagagtgtggaggtgagaagtgaaggaactaggtaagaaaatgctagatagtgtccaggcgtgttgctcacgcctgtaatcccagctactcaggaggctgagaaacaaaaatctgttgaacccaggaggcggaggttgcagtgagctgagattgcaccacagcattccagcctgggcagcagagcgagactccatcttaaaaaaaaaaaaaaaaaaggaaagaaaatgctaaataggtcatttcatgttgcaaatgtgtgatggcatgaggtaggaatcagatggtgtgaggtaggattgaggctgaatgggtaggcaggggctagatcgtggtgctccttgtgttctttctggagcttggccttctctctctaggcatgccattgggggtgttaaagcagggctatatcatggtcagatttacattttaggaagtgaatgagggggctgggcatatgctagctcatgcctataatcccaacactttgggaggttgaggtgggaggatcacttgagaccaggtgttcaaggctagcctgggcaacatagcaagaccctatatctacaaaaacatttttaaaaattttccaggcatggtagcacatacctgtggtcccaaatacttgggaggctgatttgggaggatcacttgagcccaggagtttgaggctgcagtgagccatgatcgcaccactggactccagcctggctgacagaatgggaccctatctcaaaaaataaaaaggacaaagggattgaggggagaggcaagaccagagagagagaccaggtgggtggtttctgtggttgtccaggcaggagaagatagtggagacaatggtggtgaagagaagtgggggggttgggagatatttgggagctagaagcaatcaaactgctgatggacaggaagtgagggagacgaggtgatgaggaggaagccccaggttccagccaggcgatgctagtgtcaccaagaaccagagagatcatgaggcagccattgccgaagcaaagagatgaaaacccagaggggggcactgctttgcccctcggccctcagctaagccctccttgggtgcttctgttggtaccctcatggcctggccaggtgggtcatccaggtaggaggtttggggctttgctgcgccatggtttctggccccagggatccactgccctctttgacctttgcagtccggcaagctggatgcgttcctggtgctggagcagctgcggtgcaatggggtgctggaaggcattcgcatctgccggcagggcttccccaaccggatcgtcttccaggagttccgccaacggtaagtcccaaggtctggcccaggtagggcagggggtgagcgggactgggtggaggaatggatgctggaggtacccggggtgacttctgctctgtgtttcaagctacgagatcctggcggcgaatgccatccccaaaggcttcatggacgggaagcaggcctgcattctcatggtgagcccagaagtccaccagagacctcccaacctctggccgcaagccacctgctgctcttggtgggaccgttcttacccatgtcatcactggccaaatggcacagtggaaatcaggagctcttcctttccttccttttgcagatcaaagccctggaacttgaccccaacttatacaggatagggcagagcaaaatcttcttccgaactggcgtcctggcccacctagaggaggagcgagatttgaagatcaccgatgtcatcatggccttccaggcgatgtgtcgtggctacttggccagaaagtaaagatgctttcctgcatcctaatacctcaaacgcgaatcacaaacaggggcctttctgttctgattccctgattctaagaggccacctgtttaagatgcatcattgactgaatgacagccttttcttgaaggggaagaaatgcttctactttaaataaatgtaccaagttacgagtgcaggaagggaacgagttttagacctgggttctcatcgtggatgccccagtttttgctgatgaaccttgggcaagttactctacctctctgagcttccagttttttagctggaaactgagcataatcattttgacctcagagagctgttcatgaggtgtcactaagataacgcatgacgagagcttagaacagtgcgtggttctcaggtcagaaatgattgttgttgtttttacctccctccctcactccttccttccctccctcccttccttccttcctttcttcttcctttttgagacagagtctctctctctctctctgtcgcccaggctggagtgcagtggcgcagtctcaactcactgcaacctctgcctcttggactcaagcaattctcgtgtctgagcctcccgagtggctggaattagaggcgcccaccaccacactggcctaatttttgtatttttagtagagacaaagtttcaccatgttggccaggctggtctcaaattcctggtctcaagtgatccacctgccttggcctcccaaagtgctgggattataggcatgacccactgcgcccagcctagacatgttagaattggataaaccattgaggaaagaggacttgacggtgtctagatccccgtgtcccagtgggatttataaggcagggttttggagggtgtgatgtcccagctgttctgtgaagactgggagccggggaagggttcgggttccttaatgaaagtcataccccagggactgcagggacaggtggggtcgctctctgtctggggtgtgtgttgtcattgggcagagaccacaccctcaccagtaggaccctgatgtgtcaggttcattcattgacacatggacccaagatggtcaaggccagctttgggagctcttggccctcccgcaacagacctaacttgtcaagtttcgttactaagttccctgttgctgtccttcctggataactggggcaattttattcttaaagttttcctgtgtccaagatggcagccaagcagggaagacagaattacgttcactgttctatcgtttctcaatctatcgatagcccttaaacgggaagagtgctggttcagggtcacagtgtgaaattcctaaaacaacccaggagagaataggtttgacagggctgggtgtggtagctgacacctgtaatcccaggcactttgggaggccgaggcaggaggattgcttgagcccaggagtttgagaccagcctgggcaacatggcgagacccctatctctaccaaaaaaaaaaaactttaaaaattagctgggcatggtagcatgtgcccgtagtcccaactacttgggaggctgaggcaggaggatcatttaagcccaggaatttgaggctgcagtgagccatcatcacaccactgcactccagcctgggccgcagagccagaccctgtctctgaaaataaacaaataaataaataagttagtcagaaacagctggtgtaggctgggcatggtggctcctacctgtaatcccagcactttgggaggccaaggtgggtggatcacctgaggtcaggagtttgagacccacctggccaacatgggaaaccccatctctactaaaaatacaaaaattagccaggcatggttgtgggcacctgtaatccaagctactcaggaggctgaagcaggagaatcacttgaaccccggaggtggagtttgcagtgagctgagatcgtgccaccgcactccagcctgggcaacaagagcgaaactctatctcaaaaaaaaaaaaaaaaaaaaaagaaagaaagaaaaaagaaacagctagtgcagctggggagtacgggagcccccttaggaatgatgcacatagttgtgttttctgagtggtgtttggatctcagctaagtccagggcatgttgtgagccctgggtcttccttgtccactgaaaaaggctctgtcctgtagatgatttaagttgtttgcagccagacaacacatgtgtcacacagggtttctggaagaacctgagttggggagattggggcatgtccctgtgcaggttcaggatgctgcagggcagggctctgttgacagcagggtgtggcttcatgacccccgcaccttctcttcccccctccctagggcttttgccaagaggcagcagcagctgaccgccatgaaggtgattcagaggaactgcgccgcctacctcaagctgcggaactggcagtggtggaggcttttcaccaaagtgagtgctctgccccagcccccttcccaggggcccccagccctgcttcttcactctggagccttcacatttgggacaggaggtggtcgcaagtgggtgtggaatggagggctcgaactcagaccttgagcattggcggttctctggcccgaggaggccctgtcctttggcacataggctatagccaggaccttaacacaaagtattaatatttccatccgcactggaatccctcgtgtggcccatttatagccacacccacttcctccgtagccatggaaaccactctgttctccagttctgtaattttgatggttcaagaatgctgccgggggcggcggctcacgcctgtaatcccagcactttgggaggccgaggcaggcggatcacttgcggtcaggagttcaaaaccagcctggccaacatggcaaaaccctgtctctacttaaaatacaaaaattagctgggtatggtggcaggcacctgtaatcccagatactcaggaggctaaggcaggagaatctcttgaactcaggagacagaggttgcagtgagccaagatcatgcctgcactccagcctgggtgaaagattgagactctgtctcttctttctttttttttttatttaaaaaaaaggccaggcacggtggctcacggctgtaatcccagcactttgggaggccgaggcgggtggatcacaaagtcaagaaatcaagaccatcctggccaagatggtgaaaccctgtctctactaaatgtacaaaaattagctgggcgtggtggcaaacgcctgtagtcacagctactcaggaggctgaggcaagagaatcacttgaacctgggaggcagaggttgcagagagctgagatcgcgccactgtactgcactccagcctggtgacagagcgagactccgtctcaaaaaaaaataaaacaaatattctatacatggaattagagagcatccagactgttgcatgtatcaatactgcaggtttttttttttttactttttgcattttttgaaatggagtctcactctgttacccaggctggtcttgaactcctgacctcaagcaaccctcctgcttcaggctcccaaagtgctgggattacaggcatgagccacctcatctggccatagcatattattttttatttctggcagagtcagggcctccagaggactcaactggttcctgtagtggcactggttgcattgtccccatggcacaaagacatgctctgttgcaatagactaggcttctccttatatgcccttgagtgtatccactggtgcaaggctttttcaccaagcaaacagacattgagtgcctgctgtatcccaggcacatgctaggtgctgggggtgcagctgtgaacacacaccatggtccctgacctccatgaatattctagccgaattggtggggagtaaacaataaacagataatcacagagacagatacataatggcaaactgtgataagtgcatgaagcaagctgctggagtacatagcaggggcttccttgtgccaggcaggggcttgaaaacaaagagttaggaggcagcccagggaaggacagcagatgctgctttttggaaatgttcgtccccactgaaccaacttctgaaaaactatcctaagaaaatcgtcttagccaggtgtggtggctcatgcctgtaatcccagcactttgggtggccaaggcaggaggatcacctgggttcacgagttcgaaaccagcctggccaacatggcgaaaccctatctctactgaaaatacaaaaattagccaggtgtggtggtgggcacctgtaatcccagctactcaggagattgaggcaggagaatcacttgaaccgaggaggcagaggtttcagtgagctgagatcgtgccactgcactccagcctgggtgacagggcgagactccacctgaaaaagagaaaagaaaatcaagagttaagggcattcattatggccttatttacaatagcagaatttcagtgtccagtcctagctgaatgatgagttcaataatggttcatctatcaatggaatgttttcagctattaaaatgatggctttggctactgaataggtctgctaaaaaaaaaaaaaaaaaagacttctacctagctgtctagttggacactgtggcatgtgcctgtagtcccagctactctggagctggggtgggaggatcgcttgaggccaggagttcaaggctgcagtgagctatgattgtgtcactgcactccagcctgggtgacaaaacaagaccatcgctaaataaataaattaacttaaaagatggctatgtaaagttgtaagaatgatgtaacagcatggggtaatacatatcttataatttttaaaaaaattttatttgtggagacagggtctcactgtgtcacccaggctggagtgcagtggcacaatcgtggctcactgcagcctcagcctgcagggttcaagcgatcttcctgcctcagacccctcactagctgggactacaggcacacaccaccatgcctggttacttgtttttgtagagatggggtctcatgatgttgcccaggctggtcccaaactcctgggctcaagcgcttgcctcggcctcccaaaatgctgggattacaggcatgcatcactgttcctgtctgtatcatataattttaaataataaaagcagcctctacaactaggcagcatggtcttaagtctattttttaaacatagaaaaagagccaggaaggaaatgtaaacaatgttaataatgactttgatagggaggtgggtgggatatgaaagattttttttctcccttttgtccttggaaggaaatatcacttttcagcagtagttctctgttgggatggttctaaagtggggaagatgagactttttcctttcactttgtaccttttctggtgctctgatttagagctcctcagtcttgccactgttgatattttggggtgactaattctgttgtgggggctgtcctgtgcactgtagggtgtttagcagtatccctggcctctacccactggatgccagaggcaccccccaccccagctgtgacaatcagcagtgtctccagacaatatcccctagtggggatcggtgggggcaacattgtccctggctcggaaccactgatcgaatttattatgacaacatatccctttgccacaaaaacaaatgatgggctaaccgtgtgtgtgcaggtgaagccactgctgcaggtgacacggcaggaggaggagatgcaggccaaggaggatgaactgcagaagaccaaggagcggcagcagaaggcagagaatgagcttaaggagctggaacagaagcactcgcaggtacctgtatggatgcatggctggggttgctggggaacaggacttggccccgtggggctcacccgcctcctccccaccacctgcgtgcagctgaccgaggagaagaacctgctacaggaacagctgcaggcagagacagagctgtatgcagaggctgaggagatgcgggtgcggctggcggccaagaagcaggagctggaggagatactgcatgagatggaggcccgcctggaggaggaggaagacaggggccagcagctacaggctgaaaggaagaagatggcccagcagatgctggtaaggtgtcacaggggcagcccgtggtgggtagcaaatcacttgaccctcaccacaggcctgtggaggtgcatccagggatatgtgtccctgctgggacagatgatgagacgggggcttggagagggttggtcatctgatcaaggccacacagctgggattgggactggaacacagtgagcccactctgttctattgccctgccttgcatgtgctaaccccttttctcctaacagcaagcctgaatggaggataattgtatttgttagctattgctacataacaaaacatgccaaactcagcagctaaaaataaaaagtattgcatagtcaggaatttgagagtggcttaggtgagtggttctggctgagggtccggcctgaggttgcagtcaaggtgttggctgaggctgcagtcatctgaaggctcatctggggctggaggacccacttctacttggcttattcacacagctgttggaggaggcctcagttccttatcatgaaggcctctcccctcagggctgcttgagtgtccttccaatatggcagcagagttcccccagaaggagtgatctgagagaggagaaaggaagccgcaatgccttttatagcctaatctctgaagttacattccatcacttcttcctgatttttgttgttgttgttagaagcaaatctaacccccactcaaggggaggagaattaggctccacctttttggagtcgcaaagaacttgtggatagattttaaaaccaccatggtacctactgtgctcattttatagatgaggaggttgaggttccatgaagcagagcagcttacccaggtctttattttttttttttttttgagacagagtctcactctcttgcctaggctggggtgcgatggtgcgatctcagctcactgcaacctctgcctctcgggttcaagcgattctcctgcctcagcctcccgagtagctgggattacaggagcccaccaccatgcctggctaattttttttgtatttttagtagagacggggtttcaccatgttggccaggctggtcttgaattcctgacctcaagtgatccacccacctcggcctccaaaagtgctgggattacaggtgtgagccaccacgctcaggcctttatttcttccttttaggaggctacagagttctgggcatcttcaggcctagcccctgtattcattagtccccagatcaccacgagagtaaatctgttataaccaaagctgttactcttttccctccacaacaaaggaccttgaagaacagctggaggaggaggaagctgccaggcagaagctgcaacttgagaaggtcacggctgaggccaagatcaagaaactggaggatgagatcctggtcatggatgatcagaacaataaactatcaaaagtgagtaggggccgggtgcagtggctcacgcctataatccgagcactttgggaggccaaggtatgtggatcacttgaggccaggagtttgagactagcctggccaacagggtaaaactccatctctactaaaaatacaaagattagccaggtgtggtggccagtgtctgtaatcccagccacttgggaggctgaggcaggagaatcacttgaacctgggaggtagaggttgcagtgagctgagatcgtgccactgcactgcagcctgggtgacagagtgactctgtttcaaaaaaaaaaaaaagtggaatcaagtttctgcattaaaaacaacaggcttaccaggatcagggagattttggggatttgggactttcagttctcaaagcagaaaagcccttagaaaaccaggacaagctggtcaccgtagtcagtagtcactaaccagccccacctgcttttagttctttgagctggatgtcagcttggcccctactgtgagccaggctctgtgttagatgcaggtatgcatggtgaaggaggacccttcccttgtggggtttatactgtagtgagatggcaaataatcgtcatttaccatggtgatcagggctctgaaggaaacgttcaccatattttaagagtgcggcaggccgggtgcggtggctcatgcctgcaatcccagcactttgggaggctgaggcaagtggattacctgaggtcaggagttggagaccagcctggccaacacggtaaaaccccatctctactaaaaatacaaaaaattagttgggtgtgttggcgggcgcctgtagtcccagctactcgggaggctgaggcaggagaatcacttgaacgtgggaggcagaggttgcagtgagctgagatagcaacactgcactccaccctgggcgacagagtgagactctgtctcaaaaaaaaaaaaagaatacagcagtgggggatagaggaagggtattcatagaagacttcctggaggaggtgacatttaagcagaaacttaaagatgaaggagcagttagaggggagtagaagagcatctcagctggttggcccactgtgcaaaggccctggggcagggaagagctggccagtggcaggaatggaaggagggtacctttagctgaccatacaatatgagggacaaactggcacgagatgagaaatggccagtttttggaaattgttatgggacttctctttaccatttaaaactctagttgtattttgttataatgtgggtttttctttcaactgtttacatggaaatcactaaaagtgaaacatagattctagagaaaagaaaaatcctaaagctatctctttctctttccccaaaaaggaacgaaaactccttgaggagaggattagtgacttaacgacaaatcttgcagaagaggaagaaaaggccaagaatcttaccaagctgaaaaacaagcatgaatctatgatttcagaactggaaggtaaaccagctaccaagagatttatttttattttattttattattttttttagagatgaggtcttgctctgttgcccaggctgcagtgcagtggtgcgatcatggctcactgcagcccgaaactcctaagctccagtgatcctcctgcctcagcctcctgagcagctgagactacaggcgtgcatcaccacacccagctaatttttttttattttttattttgtagagatggggtttcactatgatgctcagtctagtctcaaactcctgggcccaagcagtcctcccaccttggcctcccaaagtgctgggattataggcatgagccactattcctgggcttgaatgggtatttttaaaagcaggaaaatcagaaaggaaatttgaggatggcagatcatcccatgagtgacaactaactctatgccacctctcgaaatcacccttagtcatcacatgcactaataatatgataaaagggctgggtgcggtggctctcgcctgtaatcccagcactttgggaggccgaggtgggcggatcacgaggtcaagagttggagaccagcctggccaacatggtgaaaccctgtctcaaaatacaaaaattagccaggcgtggtggcgggcgcctgtaatcccagctactcgggaggctgaggcaggagaattgcttgaacccgggaggcggaggttgcagtgagctgagattgcgccactgcactccagcctgggcaacaagagcaaaactccatctcaactaataataatattatgacaatataaggtgctgttcatcgggagataatggtccagaccgtgactatgatggttactgattgggggatgtgttcatctcctccgggtaaaatgcctgggcaggaaggctcatttccgggcatctctctggggcctccccttcctgaagagcaccttggtttttgcagtgcggctaaagaaggaagagaagagccgacaggagctggagaagctgaaacggaagctggagggtgatgccagcgacttccacgagcagatcgctgacctccaggcgcagatcgcagagctcaagatgcagctggccaagaaggaggaggagctgcaggcggccctggccaggtagcggggctggcaaggggcatttgctgtgtgtccatgtatcccctgggcccctgctcattcgctcattcgcagtggctgtcttggtcaaggcggccccaggcccttggcatgaacttcgtttcccaggccaggcctcccacaagccttctcgaccctgttcactcccccagatcctcaccttcgactttcttctcttccctgcaaacacatcatgtctttgcagttgatctcacctactcccatggtgttgctgctgcctcttcgacatccaggcttttctcatctagacccccttctgaatttccgattgcccaatgagtcaatttccaccgtcatctcaaacacccctgtctaaggcgggaatgaccttcctttccccagcccctccctctaagggccctcttttttgtgaacaccaatctcctcctttgtttctgccgacccacagcaagcagcaaccttcagattctgccagtccttctaaatgtcccccacccatttcctctggtttttccctcttcctggctcttagctggatttacactaatgctaatactgcagcagccactatgaatgattatttacctgctcactcggtgctaagttcttttcaagcaatacctttgcagacacctggccaggtgtactgccggtgtctttgaggaggaagctgagcctcctaggggtaacgcaacaggagcaatgtcattgcttctaagaggcagagctgggatttaagcctcaaagctttctgattgatcccctggcctggctcttttgtcggccaatttgtgctatgttgacagtgctacggtgatgaagggaaagcatctctctggggcaggaacctgctcacaaaactttgctggctggatgcagtggctcacgcctgtaatctcagcactttgggaagccgaggtggggggattgcttgaggccagcagtttgagaccaacatgggcaacatagcaagaccctgtccctacaaaaagttaaaaaatgagccaggcatggtggtgtgtgcctgtagtcccagctactcaggaggctgagatgggaggatcacttgagcccaggaggttgaggctaaagtgagctatgatcatgccactgcactccagcctgggcaacagagcaagaccctgtctcaaaacaataataacaacaaaacaaaaacctaacttcactggcttactagggaaaatccagtttccttagcctcaccctcagagcccatccaccctctgcagtctcaccccaacccaactatttcactttctctcttgttgctgccctttcacaagtacagtaaaatcaaagtgcttgcctctcctgcagcattctgccatttaacagggcttcttgcagcccaccttgatctctggtcaccacctccaccagatgcagagccccagtctgaatatcccccgcaagcagtggctggccaaatgctgtgcatggggcgggtactcagtcactgagcaaatgcagaaagaacagacagttgccagggaagaagaactgtccaacattcagaaagcatctacacagtccctactgtgaccaggtaccttgccagtctggggtcaatgctttgcattcttgcacacacatgcacacacgtgcatacacacgtacacacacccatgcacatgtacaacctgttttgatgtcagaccttggcactcacatcctatgttaatctcatatagtctggcatgtcaagaagcagacctggggacatggatagaaggtgtttgatgtctctgcaacataactgtctggtcccagaaaagtttttggccacattgtaagagaggaaaccaagggacctgggggttcattctgctgggtctctccctggaaggcttgacgatgaaatcgctcagaagaacaatgccctgaagaagatccgggagctggagggccacatctcagacctccaggaggacctggactcagagcgggccgccaggaacaaggctgaaaagcagaagcgagacctcggcgaggagctggaggccctaaagacagagctggaagacacactggacagcacagccactcagcaggagctcaggtgaggggcccatcaatcccaccatcctgctatcccactgcaccaatgggatgggggcagaagaggggacaaacccaaagcaaatcgtgcatcagcccctgtgcatttaccttcctggccgcggtttgctttaacttatagaagcatggttggctgtttcttttttttctttcttttttttttttttttgaggcagtctggctttgttgcctaggctggagtgcagttgtgccatcttggctcactgcaacctccacctctgagatttaagcgattctcatgcctcagcctcctgagtagctgggattacaggtatgtgccaccacacccggctaattttttgtttttagtagagatggagttttgccatgttgcccaggctggacttgaactcctggcctcaagtgatccacccacttccgcctcccaaactgctggtattacatgtgtgagccactgcacccgaccctcatcatcttatttctcatcagaagagtagtatataccagggatgtacaatcttttggcttcccttggccacattggaagaaaaagatttgtcttgggccacacataagatacactaacactaataatagctgatcaactaaaaaaattttacaaattggaaaaaacatctcatactgttttaagaaagtttatgactctgtgtcaggctgcattcaaaaccatcctcattggtaagcttggatatactcagagaacaatttgaaaactatagaaaagcagacataaaaaaaaatcacctttagggtcgggctcacgcctataatctcagcactttgggaggccaaagacaggtggatcacttgaggtcaggagttcaagaccagcctggccaacatggtgaaaccctgtctctactataaatccaaaaattacctgggcgtggtggcgcatgcctgtaaatcccagctactcaggaggctgaggcagtagagtcacttgaatctgggaggcagaggttgcagtgagctgagatcgcaccatcgcactccagcctgggtgacacagtgagtgagactccatctcaaaaaaaaacaaaaaacaaaaaaatcacccttagtcacaccagttaacattcttgagaaattccttcctgtctgtgtgtgtatcagtcagtccccaagctccaattcccaagtatgtgtgtgtatcacttttgtgttaaattttaaaaataaaattgatcagattggttttcaattgaagattcacttcaaatgaacaaacaataacaaactgcctgccagatcacgaatcctgactctagtgaaactaggtcattgattcattcagtaaacacataaatgtattttgatgcaatctgtggtgttggcatagcatgtatcatagcatatagctatgctagctgtgccaacaccatataccctggggtttacttcccccactttgggttttgtgcagtgtcacatgcacatagagcacagcgttctgctcccttgccgcttggcctttgatacagaagagcccagtgcatgggccaggtatggtggctcatgcctgtaatcccagcactttgggaggctgaagcagacagatcacctgaggtcaggagttcgagaccagcctggccaacatcatgaaaacctgtctctactaaaaagacaaaaattagccgggcgtggtggtgggcgtcggtaatcccagctacttgggagactgaggcaggagaatcccttgaacctgggaggcagaggttgcagtgagctgacatcattccactgtactccagtctggacgacggagcaagactcgataagaaaaacaaacaaacaaaacaaaaaaccaggctgagtgcggtggctcacacctgtaatcccagcactttgggaggctgaggcgggtggatcacctgaggtcaggagttcgaaaccagcctgaccaacatgttgaaaccccatctctactaaaaatataaaattagccgggcgtggtggtgggcacctgtaatcccagctacttaggaggccgaggcaggagaatcgcttgaacccgggaggtggaggttgcagggggccaagattgcgctgtcgcactccagcctgggcaacaggagtgaaactccatctcaaaaacaaacaaacaaaaccatggactcaaggtcaaggtttagcttctaattctggctccatcacacaatggctgtgacaccatgggtaaaactgcttaccctctcttagccttagtttcctcatttgtaaaatggaaataataacacacctgcctctttgggttgctctgaggattagatgatgtatataaaaaacttagctcagggcctggcatatagtaactgctcattaaataagagccaacattaatatttaagcaaaattttgcagttcacagacatcctttcaattctattactttgtgtatttgtttgccagtcattacagatgtcctaggcaggtgatatgctccacattttgcagctgaggaaattttaggtccagagatgttaggtgaatgacccaaggtcacacagctagagaggggtggtgatgaggactgcagctctgggtcctggaagagctctcattcttttgcacggcactgagatgaccctctgtctccacccaactgccattcactgtgttcctcccaccaagggccaagagggagcaggaggtgacggtgctgaagaaggccctggatgaagagacgcggtcccatgaggctcaggtccaggagatgaggcagaaacacgcacaggcggtggaggagctcacagagcagcttgagcagttcaagagggtaatgctttttggtgatgctttttggtgatgacacataagagtgacatcagcagcctcaaattactacaggtcagggtctgcataaagacaaaaaacaagttacataagattctaatgatgatgatagcagcttatatttatttacaaaatgcttcccatacaggctgggtgaggtggctcacgcctgtaatcccagtacttggggaggctgaggcgggaggatcgcttgagctcaggagttggagaccagcctgggcaacatagtgagaccttgtttctactaaaattttaaaaaagtaggccaggcgtggtggctcaagcctgtaatcccagcactttgggaggccaaactgggtggatcacctgaggtcaggagttcgagaccagcctggccaacatggcgaaaccctatctctactacaaatacaaaaaattagccgggcgcggtggtgcatgcctgtaatcccagctactcgggaggctgaggcaggagaatcacttgaacccaggaggcagaggttgcagtgagcagagatcatgccattgcactccagcctgagcaacagagcaggattccatctcaaaaaaataaaataaaataaaatattggccaggcctggtagtgcattcctgtggtcccagctatttgggaggctgaggtgggaggatcgtttgagcctgggaggttgaggctgcagtgagccctgtcatgccactgcactctagcctggacgacacagtgagaccttaatcaaacaataaaaataggctgggcacggtggctcaccatgtctgtaatcccagcaatttgggaggcaaggcgggcaaatcacttgagctcaggagttcgagaccagcctggccaacatggtgaaaccccatctctaccaaaaatataaagaattagctgggtgtggtggcatgtgcctgtaatcttagctactcgggaggctgaggcaggacaatcacttggacccaggaggaagaggttgcagtgagctcagatcgtgctactgcactccagtctgggcgacagagtgagccgccatctcaaaaaaagaaaaaaaaaaaagaatgaatagaaatgcttctcatacagtatgtcaattaatcttcacaaccaccctgtgagacgtgtactattaaactcattttacaagcaaagaaactgaggtcctaggtgcctagaggtgaagagacttacccaaggtcacactgctggtaagtgacagagccatgatttgcacccaaacagtctggtcctagaccccactttctggcctctacaggactgaaggcctataggatgggtggggcctatcaatatactgcccttcagggataagcaaaggtgtaacaacactttcggggagatttaaatgaaacttaaaactgggatcattctatccactttaatttctctgcagactggaggaaggccaggcatggcggctcatgcctcccgtaatcctaacactttgggaggccaaggagggaggattgcttgagcccaggactttcagatcgcctgggcaacatagcgatttttcttttgtaaaaaaaaaaaagactggaggaaacttgtcattatttgatttcaatggcagaacagctctctccggcataatttgagaatgactaggtcaaatcactctcccgttgttggaactctttgcggtgtatgggagtgggagctggtaaatagcagtaccgaatgctgaatcttgggtgctcttctctcctttggggtagtgcctgtgcttcattccccagggtaagttttttagcttgcgaccttcggccagattgttttcctgaaagcctgagttacattaccctcagcgttgcagctcctccacatccccttcagtggaagcttttggttctgctagattaagtgggtgcagcattgcctaaaaattttggggaatttgcatttggttctatcactagtgtattggtccgttgttgcactgctctacagaaatacccaagattggattatttgtttattttttgagcagtggagtcttactctgtcactcaggctggagttcagtggcgtgatcttggctcactgcaacctccacctcctgggttcaaatgattctcctgcctcagcctcccaagtagctgggactacaggcacacaccaccatgcccggctaatttttttttttttttttttttttagtagagatggggttttgccatgttggccaggctgatctcgaactcctgacctcaggtgatccacctgccttggcctcccaaagtgctgagatgacaggtgtgagccactgcaccaccctgagattgggtaatttctaaagaagagaggtttaattggctcacggttctgcaggctgtacagaaagcatagcagcttctgcttctggggaggcctcaggaaacttaccatcatggtggaaggcaacggggaggcaggcatgttttacatgaccagagcaggcagaagagagagaatggggagctgccagacacttttaaacaaccagatctcatgagggcagcaccaaagggatagtgctaaaccattagaaactgcccccaaaggccgggcgcggtggctcatgcttataatcccagcactttgggaggctgagataggcggatcaccaagtcaggagttcaagactagcctgaccaacatagtgaaaccccatctctactaaaaatacataaaattaggctgggtgcagtggctcacgcctgtaatcccagcactttgggagcccgaggcaggcagatcacctgaggtcaggagtttgagaccagtctggccaacatggcaaaaccccgtctctactaaaaatacaaaaattagctggacgtggtggcggtcgcctgtaatcccagctacttgggaggctgagacatgaaaatcacttgaacccaggaggtaaaggttgcagtgagccaagattgtgccactgcaccccagcctgggcaacagagtgagactcagtttcaaaaaaaaaaaaaaaaaattatggttggaagagtgaggccccagacagaatcactgaccctccccatgcttggggttcattagacgtgaacaggagctagaagccaagcccattcccagccaggcctctttgggaagacgcagttattaagaccaccagcagacggcatgtccattactgacccgcacaaagcaggtagaggtgcaaacctctgcccatctcaggtgcagggaaacagaggcctttgcctctaacaacttgaattctgatgtagagacctggttccatctgcttgtgggggaaacgtttaacatcagctcctacctgggctccccaggccctcgtgcggtttggccccagttctggggtcttaggctgggctaaggtttctgggagcccatgtcccctagggtccccgcttcactgctttgttaccaccaagagactccctgtccccatctgaggtctggcagctcttagtcatgtcttggagggaggacgggcatccagggctgaccggtcaacgtccagcacctcccagggactatgggaagactgagtggtgggtctcgtcctctcgggatacttgcgcttctctttccccttctctacaacctggaaagaagcccctcaccgcgtcctacttttgcccaacacgcttttttttttgagacaaagtctcactctgtcgcccaggctggagtgcactggcgggatctcggctcactgcaacccccgcctcctgggttcaggcaattctcctgcttcagcctcctcagcagctgggattacaggtgactgccaccatgcccggctaatttttatatttttagtagagacggggtttcaccatgttggccaggctggtctcaaactcctgacctcaagtgacctgcctgcataggcctcccaaagtgctgggattctaggcctgagccaccgcgcctggccccaacacactttttttttcctgtagggcaactcacatgcctacaggagctggttccataaaataagtttcccttaactaggacagaagtagcagtgtcaatcacacgacacctgtgaaggacgggggcggtgaaaggtgactgccccacctgcagagccagccgctacttagatgtggcagattgttgccttgaaggaaagcaagaccctctgtttccagatctttcgttgttgttggttttttgtttttgtttttaagtttaggattactgaggcatatgtagtaaaatttatccattttactgctccattaattttaacaaatgtgtattgtgtaactaccaccaccacagtcaccacatagaatgttagttattgattgattgattgagatggagtctcactctgttacccaggctggaatgcagtggcatgatcttggttcactgcaacctccacctcccaggttcaagcaatacttgtgccttagccaccccagtagctgggactacaggcgtgcgccaccatgcccggctaatttttccatttttagtagagatgcagtttcgccatgttggccaggctggtctcgaactcctcacctcaagtgatccacctgccttggcctcccaaagctacttatttctgaaacagggtctcactttgttgcccaggctggagtgcagtggtgtgatcatagctcactgcagcctccaattcctgggctcaagcaagcctgccatccgcctcctgagtagctgggattgctggtgtgtgccccccacacccagctaatgttttattttagtagagatgggggtctcactacattgcccaggctggtcttgtactcctggccttaagcgatccttctgcctgcttcccaaagtgctggggatgacaagtatgagctgccatggcatgccttcaaacattaaagttttttgaaaaagaagctgggaatccagatttttatgtgacatttattaaaatgtcggcaactcatttttttaaaagtagtgaaagggtcaaaggggacatgtcagcaggttggataccgcttgtgggattccagattgcaacccatgagctttaggaaaatagaatccaaaatatcagctgggtgcggcagctcacgcctgtaatcccagcacttagggaggccaagatgggtggatcacttgaggtcaggagttcgagagcagcctggctaacatggtgaaacctcgtctctactaaaaatacaaaaattagtcgggcatggtggcgggcgcctgtaatcccagctacttgggcagctgaggcaggagaatagtttgaacctgggaggcggaggttgcagtgagccaagattgtgccacggcactccagcctgggtaacagagttaagactccatctcaaaaaaaaaataacaacaaaaaaaccccaaatctcttactggtgattgtgtgccccctgttgtgtgccttcctggacctctctgagggaggaaagggcagggcctgaaacgttctcccggccacagcctccctgttatccctcccctctgcttccttcgccaggccaaggcgaacctagacaagaataagcagacgctggagaaagagaacgcagacctggccggggagctgcgggtcctgggccaggccaagcaggaggtggaacataagaagaagaagctggaggcgcaggtgcaggagctgcagtccaagtgcagcgatggggagcgggcccgggcggagctcaatgacaaagtccacaagctgcaggtgaggaggtggcgcggtggtgtggtgggcagtgctgggtggtgcccagttctgtggggaggagcctcttcccggctcgctgaggtctctcttgctgcaaggcaagtcctttcctctagttgcgttcctggaggagaggcgatgatctccctgttcaattaaatattaaaaaaaccttctggccaggcacggtggctcatgcctgtaatcccagcactttgggagacagaggtgggtggatcacctgaggtcaggggtttgagaccagtctggccaacatggtgaaaagtctctactaaaaatacaaaaattagccaggcgtggtcgtgggcacctgtagtcccatctactcgggaggctgaggcaggagaatagcttgaacccaggaggcagaggttgcagtgtgcggagaccgcaccattgtactccagcctgggctaaaagggcaaaactctgtctcaggaaaaaaaaaaaaaaagaaaaaaaacccttccttttccaatttgataagtatttattgagcacctgctgtatgccaggcactgtgcttaatcctgagatccaacagcaaggaagaagagacactgtcgctgccccagtaggactccagccgagtaaggggaagggaagggaagggaaagacatgaataatcacacaaatgaatgtcaaatgatgcagcaaagggaaggcacatgatgcccaagtgtaaataaccagggggcctaacctgggggaggaggagccacgaaaggcttccctaaggagcatggataagtctaccaggcagagggaacagcgtgtgcaaaggccctgtggtaagtagaaaaattaggagagagacatacagccagtagagctggagtgcccagctggggttgggggtagggggagatagtacagagtggggttggagggggagcttgtacccagatgatgtagggcttttgagaacctattacatgtatgttgatccttactctgggcaatgtgaagctgttgaggggttttaagctgctgaatgacatggtctttttgtctttggtcttctttcacttggcatagccatttaccctgccttgccactcatggggacgtggccaaagttttcacaaatgtttaacatgtccacagccagggaccaaggggcgagggaagaattaagtgagatgtttttttctcacatgcagttgagagcagggcttttgccgccctcatataagcagtgtcaagatcattcatatcctccttgtcaatggaagagatggaggggtaggctaacagcctcaaagggacttatgcagagacactagggagtaaaagccagagaatacagagaggacgtttttacctttagggcctgcgtctctggctttggccatcagggtcaaagagtaggagtgaggaaggaagggatgggacagcatccctgggacgttcaagtaccatcctggtctcccttctccagccttagagagtggaccagccagagcacctcgtctggactctcagacctgctgctttgtctctaccaaccttggcagggatctaggatccatttagtgggatcaggtcccagtcaataccattggggctcaaataagttcttagaaccacagagtctagggccagggtcccaactcataggtgacggagttcccttcaagccacagattctgttttttttgtgtgtgtgtgtgtttttttttttttttatcagagtcccatacctcacgggtattttctcaatcagtgaacacctcaagtactagcccatgtgttttgagtaaaaagggctcctttcaacgaggatccccttctagaggctttgactaaccagtctcttggcacccttagaatgaagttgagagcgtcacagggatgcttaacgaggccgaggggaaggccattaagctggccaaggacgtggcgtccctcagttcccagctccaggacacccaggtgagtgtcctgccacatcatccaggggacctggggggtggccttcctcggggcaggtccctgggacctctttgcatcccttttgcaggagctgcttcaagaagaaacccggcagaagctcaacgtgtctacgaagctgcgccagctggaggaggagcggaacagcctgcaagaccagctggacgaggagatggaggccaagcagaacctggagcgccacatctccactctcaacatccaggtgcctgccccgtgtccttgcttccttcatgggtcctctcaacttctctgcgctgagatcccccgcaggcagatcgcggtggagtgttggtgcgatggtgcttgaccccccagcttcccctgctattgggtttctccaacgaggagacatggtcttcgcttctcagagtctgtggggccagggacaggggccactcatggtccccctctcaccctaccctggacgctgtccttgtagctctccgactcgaagaagaagctgcaggactttgccagcaccgtggaagctctggaagaggggaagaagaggttccagaaggagatcgagaacctcacccagcagtacgaggagaaggcggccgcttatgataaactggaaaagaccaagaacaggcttcagcaggagctggacgacctggttgttgatttggacaaccagcggcaactcgtgtccaacctggaaaagaagcagaggaaatttgatcaggtagagggcgtggggtgtcccccactctggccatggacgctgggttggggaatcagctctgcagagtatgacgcgtggctctggcctgtgcctgcatcccctctccactctgtggggagccatgggaggctgtcttatcttgtcttgggcgaccatggagcattaacgctaccaggtcacagtaaggatggcaaagaagccttgatgactgtgacttttctgggtaccagcaccatgagggtcacctgcacacatggtgatgccttagtttctagcctgaagaaggaatgaggtgcttatttattcactaaatgtatttactgaatacctattgagtagtattccaagtaattcagtttctatacttttaataccactcttccctaagatttcattctgtaaaattccaagtacacagcaaagttgacagaattgtacggtgaacacctttaaggccaccacctggattcagtcattgacactgtattatatgaactttatcagatacttattttgagacaggatctagctctgtcacccaggctggagtgcagtggtgtgatctcagctccccgcaacctccaccactgggttcaagcgattctcctgcttcagcctttcatgtagccgggattataggagcacaccactatgtctggctaatttttgtatttttagtagagatggggttttgccatgttgtccaggctggtctccaactcctggcctcacatgatctgcctgccttggcctcccaaagtgctgggattataggtatgagccactatgcccggcccacatatttatttataaagactaattctatctatcatgccttatctcttgggtacatttcagagcaaattacagatgtcagtacatttccccttccacacctcaacattgcatattaattagagtttatttttaaacacaattttgcttcttttggggtaaaacttacatgtgatgagattcacaaatcttaattgtacgataaatggagacccctgtatgacccaaacccctaaataccaacttttaagatacattattatttagtaaatatgatttagtttacaagtgactcagggttattctaaaaatcagtttgagaggccaggcacggtggctcacgcctgtaatcctagcactttgggaggctgaggcaggtggatcacttgaggtcaggggtttgagaccagcctggccaacatcgtgcaactttgtctctactaaaaataccaaaattagccgggcgtggtggcgcacgcctgtaatccctgctactctggaagctgaggcaggagaatcgcttgaacccagggtggggtggaggttgcagtgagccaagattgcgccactacaccccagcctgagtgatggagtgaaaaccctgtctcaaaaataaataaaatgaggattgtacagtgaggctaaatgccagatgcctgcaggttccctacccctccctgactgacctcctagtgtcaggattctagataacatcccagtttctcctcttcccatcagctacctctcctctgggctgtcagctcatcttcaatgcttcgttatctggttgaaggcctgaggttgcttttattttcctgtcacatagagtgtagtgcagtggcacacatagtgtgggatttttgtgttgactgtgccatttagaggtccctgtctttgctgaatactggaagtttggcttttggatgttacaatttataatctgctctgttctctctgaagatgagattaacgtgagcatggaatgttctctgagttgcttctccaagcagagagatatgtgtgcagggccacccatgcttaccatttccctactgaggctcttaggatacttttgtaagatattaatagctacttgtggccatgaaacaaactaataactagcttctggcagctttaaatctcactttgacctcagtgtgctctaagcaacgtgggcaggtctagtggtttcgaagcacaaggatttggccaggtgtggtggctcacacctgtaatctccgtgctttgggaggccgaggcaggaggctcacttgagggtcaggagttcgagaccagcctggtcaacatggcaaaaccacatctctacttaaaatacaaaaattagccaggtgtggtggtgggcacctgtaatcccaactactctggaggctgaggcaggagaatcgcttgaacccacgaggcggaggttgcagtgaaccaagactgcaccattgcactccagcctgggtgacaaagtgagactccatctaaaacaaacaaacacacaaaccaacaaaaaaaaacaagtcagctgatttctggctctgcataaggttgatgtagaagtcagaacgccagatgattatataaattactcccatagctaacctacactgcttacacctgcacctcaatacattcagcaggacacagggcttcccccggtatttacaattcagtgacgctgaccccggatatgcctagaagtcacctctgggtcttgtgttgtagttgttagccgaggagaaaaacatctcttccaaatacgcggatgagagggacagagctgaggcagaagccagggagaaggaaaccaaggccctgtccctggctcgggcccttgaagaggccttggaagccaaagaggaactcgagcggaccaacaaaatgctcaaagccgaaatggaagacctggtcagctccaaggatgacgtgggcaagaacgtaagtggctctgggtggtttttctcgtccatgtttcgcctgcccaccctctgtgctattcaccagtccatgcgaggctagctcctggcctttttcatagcgaactatcatcggaaatggaaggaggtttttggactggtgcaggggctgggaggggctgagaatggcagtcgaggatgggtctgagttggggggtccgaggataaggctggggtctgaactctcaggggtcatcttgagtcccggccatgcatcctgtgggaggccaaagccacctccctgatctcctgaggtgccgctcacggtgggtttctcaatcgtcttcatgaagttgagcctcatagaatggggctgcccgctctgccggcaggtccatgagctggagaagtccaagcgggccctggagacccagatggaggagatgaagacgcagctggaagagctggaggacgagctgcaagccacggaggacgccaaactgcggctggaagtcaacatgcaggcgctcaagggccagttcgaaagggatctccaagcccgggacgagcagaatgaggagaagaggaggcaactgcagagacaggtgcgtgctgccggggaggccagcagagggaggtcgggtggcctttttcattcctatcaccactctcatggttggtgtggaaacttcgttttctttatttttttttgaaacagagtctcgctctgtcgcccaggctggagtgcagtggcgtaatctcagctcactgcaacctccacctcctgcctcagcctcccgagtagcttggattacaggcgcatgccaccatacctagctaatttttttttttttttcagtggagacaaggtttcaccatgttggccaggctggtcttgaactcctggcctcaagtgatccattctcctgttggcctcccaaagtgctgggattacagacatgagccacccacgcccggcgtgattccgttttctcatctgcaactggggatgagatgcccacctcacaagggggctgtgctggggaaggggtgcagtgatgtgctgcctaggtgagccaaaggacctcccaggggcaagtggggcagcacacatctctattcctcgcccagcttcacgagtatgagacggaactggaagacgagcgaaagcaacgtgccctggcagctgcagcaaagaagaagctggaaggggacctgaaagacctggagcttcaggccgactctgccatcaaggggagggaggaagccatcaagcagctacgcaaactgcaggtgggtgacactaggagcttggggcatgggtggagggagggcacagttcccctcaggccaccgaagtcagcagagcgggctccaggaagcaagcctgcacctgccattggtgtgggttcagctggggtttttctggaaccattcaggatttggtggctgtctcctgccctgggtagggcagcattattaggtatttggccactgccctcagatcacatcaggggctcagcttctcaggcaggtctgtggagcccacccagaatggtgctcccagcgcaccaccagccacctggaactgagagccatgctcgtgcaatgggaacttctttgtggtcaactgcagaaaatccaaggggtgggtgtgcaaagctgaactgggcagcagaacttgggggagtaaggacatctgagcttgtcctccctgttgactcatgcaggctcagatgaaggactttcaaagagagctggaagatgcccgtgcctccagagatgagatctttgccacagccaaagagaatgagaagaaagccaagagcttggaagcagacctcatgcagctacaagaggtaaagcctcgccttgctaggagagcctcagatgcgggtgtcacggtagcaccccttggcagctccagtctgtgcattcccagatttcatttcgtcctcctctggggtccacctgtctagaaagacacacgcttccctcctctatgtattcacggggcctcccctgagctcagaggaagaacatgtactttcaagggtggctgagttgtcagggtggactcttggtggggcttggcctttccctggcagacaacagccttcctccctcccacctaggacctcgccgccgctgagagggctcgcaaacaagcggacctcgagaaggaggaactggcagaggagctggccagtagcctgtcgggaaggtaggaaactgaatggaggaagagggctctgaagcagaggatggggggacaggcagcatcctcgacccccattttattttttaaattttttcgagacagagtttcattctgtcacccaggctggagggcagtggcacaatcttggctcactgcaacctccacctcccaggttcaagcaattctcctgcctcagccttctgagtagctgagactacaggtgtgtaccaccatgcctggctaatttttatatttttagtagaggtggggtttcaccatgttggccaggctagtcttgaactcctgaccttaggtgatcctcctaccttggcctcccaaagtgctgtgattacaggtgtgagccaccgtgcctggccctggacccccatttcaatgctgctgctgacgaagcgtcctctgagattggggacagacccatggtggttaggttttccgtcagcgctttcatgcctgtttgggggtgtggctgctttcattcattcccaataagtagctgtgtggggagaaggggaggccaggaagagtcagggaggagtgtgctggtccccatcccaatcccagctttgctgacacggacccggcctgagtcccggctgtccacttcctggctgtgtaactacagatgagtcttctaatcttctccaagcctcagtttcacccattagatgatgagggcaatacccctgaggcatgactccaaggagggggcatcttttaaggcgggggagggtagaggcccccaccatggccgcccttcccccaggaacgcactccaggacgagaagcgccgcctggaggcccggatcgcccagctggaggaggagctggaggaggagcagggcaacatggaggccatgagcgaccgggtccgcaaagccacacagcaggtgagggccgcctggacaccacagtcacgctgcctactgtctctcctgcagcaggatcctgcaccagtcaacacacgcgtggcggcttcctgtgtgcaggccctggattgagggacaagagggtggtggggcctgagagtagagatccagggcccttacaccagtgcccaggctgctgtcttcagaatactcctctccacgctgcagtgtctcattttccagccacggcgtggctggctccccgtacctcacggccatccctggagtccgggccttgggatgctctttcattgcgttttcccctagctgaagctctgaccttatccagtgagcccttggtgatgtcactgagcactagttccatggtgggcactagggaccatccagtaacctgcagccccttgtggtgtagggtgaacaggcatcattctccaggcgactccaggacagagaaagcaagggacaagtcactcgctcagcctgggtggcactgacacttgtggaagcacctcttttttttggagacagggtctctctgtggcccaggctggagtgcagtggcgcaatcttggctcactgcaacctctgcctcccaagttcaagggattctcctgcttcaacctcccaagtagctgggactacaggcacgtgccaccactgcccggctaatttttgtatttttaatagagacggggtttcaccatgttggccaggcaggtctcgaactcctgagctcaagtgatttacctgcctctgcttccaaaagtgctgggattacaggcgtgcgccaccacgcccggcctggaagaagctcttgagtggagttttacaggatgaaggagaggacagggtgcccgggatcaagggactcgtgcagaggccaaacaaggcaggaagaggcatggtctcagtgcgctctcttgggcttccctgagtccgcctcatggccttcactctcctccccaggccgagcagctcagcaacgagctggccacagagcgcagcacggcccagaagaatgagagtgcccggcagcagctcgagcggcagaacaaggagctccggagcaagctccacgagatggagggggccgtcaagtccaagttcaagtccaccatcgcggcgctggaggccaagattgcacagctggaggagcaggtcgagcaggaggccaggtatgcgggtgtggagttccgaacccagtttgcaggggggtgatggacagcaggagtcatagtgaagtcagggaacctcttccagcatcagttctggcttgtaagaagcaagctctgtgatgcctacagtgcaggtatgttgtgagaactgaacgtaaacacagcaaagtgccctgctggttcctggcctagggcaagcacctaaagtgtgagctgctcttagcatctccatggtcctcctgacattaacctgccttcccagcagtacatatgacttttcccagcctctgcagggatagcatgctgacagatcaaaaatccaaccaggctggacgtggtggctcacgcctgtaatcccagcaatttgggaggctgaggcaggtggatcacttgaggtcaggagtttgagaccggcctggccaacatggtgaaaccctgtctgtaccaaaaattagccgagtgtggtggcacatgcctattatctcagctactcaggagactgaggcaggagaatcactccaacgtgacacgtggaggttgcagtgagccgagattgtgccactgcactgcagcctgggtgacacagtgggacccttccacacacatacacacacacaaaaaaaaccccaaaaaacaaaagtccaaccggcagcccatttggtacacacactggaagccttcttaattatgggtcgaatgaggcatatgatcacagcacatttcttaccattggattctaaggattctcacccattctcttctagtagctttttcagtaattcgcacgccctgcaatgcacccatttaaagtgtataattcaagggctattcatatattcacaaacatgtaaaaacgatcaccacagtcattttgagaacattttcatcggctcaaacagaaaccccaggccatatgtggtatttcatgcccataatcccggcactttgggaggctgaggtaggtgggagcagcacttgagtccaggagttcgagaccagtctgggcagcatagcaagacttttttatttttatttttttgagacatagtctcactctgtttcccaggctggtgtgcagtggtgcgatctcagctcactgcaacctccgcctcaccctcccaagtagctgggactacaggtgcacaccactgtacccagcttgtaattgtattttttagtagggatggggtttcaccatgttggccaggctggtctcgaactcctgaccacaggtgatctgcccacctcggcctcccagagtactgggattacaggcatgagccaccacgcctggccagagactccgtttctatgaaaaacttttaaaagtctgagcatgctggtgtacgcctgtagtcccagctacttgggaggctgaggtgggaggattgcttgagccaggagttcaaggctgcagtgaactatgaactagggtgaagagcaggcattggagcaccactgcactccaacctgggtcacacagcaagaccttgcctcctccccgcaaaaaaaatagaaaccccatgccctgtaaccactcccttcagtccctggcaaccataatctactttctgtctctatgaatttatctattctggacacttgatatcaacggaatcacacactatgttgtctgctatgtgtcttctttcacttggcaagaattccaggctcatccatgctgtggcatgcattgatactttattccttttcatggctgaatactattccaccatctgactgattcttgagaggagtccagatacggggctcaggaaagcactcaagatgccacctccaggtgacacaccagctacaaggggtgccaccctccgctgaaaccacctgttttccttgctgtttgcagagagaaacaggcggccaccaagtcgctgaagcagaaagacaagaagctgaaggaaatcttgctgcaggtggaggacgagcgcaagatggccgagcagtacaaggagcaggtagcccctgccacccagcctccctcgagcccccagcccccagccggcctcccctaaccacccctccaactctccgcgacaggcagagaaaggcaatgccagggtcaagcagctcaagaggcagctggaggaggcagaggaggagtcccagcgcatcaacgccaaccgcaggaagctgcagcgggagctggatgaggccacggagagcaacgaggccatgggccgcgaggtgaacgcactcaagagcaagctcaggtgaggagcccgtggcccgggaggaccccgtctctcaggccagagaaaagcactgggggctcgggctcctttcggcctgcaaatgccccttgtgcccacagccgccactcccttctgtggtttattcctgcttctccttaatcactaagcttagtgtgggccaggcactgagatcagacccgggccctgccttgcctggtagcagctaaccttctagatcctttaacgatcgaccgtctcccatccggtcctccggctgaggaggaggaagaggctatccccactgtctcctccagcccctccttcattgcatcactgagtcttcacgacatccattgaagctgcaacaccaccccccgccacttcacctccttcctgacatgctctgctcctcctttctccccctcagcactgctgccatctgggctgcattattctcgggtatgggggctgtccgacattccccatcagaaggaaaaagatccctgaaaagtagcaggtgcttacatttctggcctctacccaccggctgcagtagtcccccaccaccctgcaatgtgacaaccaaaaatgtctctagatgttgccagaagtcctctagagatgggagggtacgactgccaccccgctgagaattcctgctgtcactggagtgggggctgttttctctcccatgcctctggtaccttgggggtcccccctgctcccaagggctgcttccaccaccctgtccatccatcccgattggctcccaggaggttttagctccgggcttcctgtctcccacaccactcctcacagttctccatgatttcaacatccaggtgggcgacgcagcctctcggttccttgaccctctgggtgatcctgctgcttctaccgggccaaccagtactcctaggagccctcacaatttgaccctcaggcatcccattgtctgcctggtgccacctttctttggctctgtccccaacggggtcttcactccattaatgccatcagcctctgacccagctccaaaccagctgtctagtaacccccgtcgcgcatcctcaacatccggttccccctcttgcattgctgcaatcatttggtgaaagcacaacccaaatgaaactcaagcttggctgggcacgggactcacacctataatcccagcactttgggaggccaaggcaggtgaatcgctttgagctcaggagttcaagagcagcaagaccccatctctacaacaaacaaacaaaaatcagccaggtgggatggcgcaaacctaaaatcccagctactcaggaggctgaggtgggacgatcagtggagccccagaggtcaaggctgcagtgagccatgatctagccaatgcacttaccctggatggacagagtgagaccctgtctcaaaaaacccaaaacccactctccaccttttcccacagagcaggccttgctcaggggtcctcccacacccctccctcatcttctcactctctgctgcttttcactttttctttgaacttatgatcgctcctccccattctctctcagctggggaccttacttcctacttaactcaaaagcagaaatgatcatgaaacgtgcacaagctcccactgcctcatcatcctacctccgtgcacctctgtacacttctattttttttccatttctatgctgaaccctctggcaccaaccgaggccaacacctccattggacccgaccctcttgttcactcaagcacatagctccaaaaatccttattttgcaaggttttctctttcatttgctccatcagcaaatggaataacctcttagccccatgtctaccttgctacccttactacaaaactggatgtgaatgccgaaaccctgtctctaccaaaaaatataaaaattagccaggtgtggtggtgcatgcctatagttccagctactcaggaggctgaggcacaagaatggcttaaaaccgggagagagaggttgcagtccagcctgggtgacagagtgagactcggtctcaaaaaaaaaaaaactgtatgtgaagagttgctggttcccctcgcccccacccatcactctcccagaagcctcccatgggtgacactaatggccagaggtcccctgacagggcagcagcacgtgacgcagtccatcatgcctctggcctaattcacttgcttccctggacttccccgacaccatccacacctgcttgtcccccgacctgtggggttgtccctcttcctctcctctgctgatccctcacctcgaaacctgcttgccactagaccgccccagggtatcaacttagttctcttttgggcagagtcttgctctgttgcccaggctggagtgcagtagcactatctcagctcactgcaacctctgcctcccagttcaagctatttttggcctatttttatatttttagtagagatggggttgcaccatgttgcccaggctggtcttgaactcctgatcttgtgatccacccgcctcagcctccccacgtgctgggattacaggcatggaccactgcacggccttagttgttttcatctctccccagcgctaggtgagaggtctcaactaatcttggcgctttagaattccatgtatatctaatgactcctcagttcatctctgagaagccctagcttcttcctagaacctcagaccaccctcccgttcccacatggatgtctaataggcagctcacaccaaacatgctgcaccccaagtcctgactgaaactcttcacccccaaactggctcctctctccagctcagcagctaaaatgatgaagttgccaacaattcacatcacaaacctcgtggtccttcttaacgttttggtctcctttataccccacatcccatctatgggagaatctggtcaactttccctaaagaatcctgcccaggctgggtgcagtggctcaccccttaatcccagcactttgggaggccaacgcaggctgatcacctgaggtcaggagttcaaggccagcctgaccaacatggtgaaaccccgtctctactaaaaacacaaaaattagccgggtatggtggggcgtgcctgtaatcccagctactagggaggctgaggcaggagaatcgcttgaacctgggagacacaggttacagtgagctgagatcgcaccactgcacttcagcctgggtgacagaccaaaactcggtctcaaaaaaaaaatctccagtgtctaggacagcaccaggcagagtgaacctttatccctcgggtcctagatattttccccgcttcattctcataccaccacagccatgtgctgagcctcttactacctttaataccaatgacttgatcttttaacagttttaatcatacatgaatataacggcaaataaacatacctcctctatatttttaaaccagcatcacctctatcaactggttacgatgaaagtaatatgataaaaatagtatcaagttcaatatctagctattgtggccacaacttgatcaccaagacctgaagcctacttctccactaaaaagggagtgacaacagccattagcaccaaatagactctctctgacatcataattagacttgtttaaaaagagttggaaaggaaatgactttctcagggcccagttcagttagcggatggcatgcccggaagccatctgaaatcacctctagagtttggggaccactgcgtgagacagggaaaagtccaaacccctctgagaaggggaagagagcagctggcgcagggcaccaagccttcagggaaaagccccactcgctgcatggtgagcgcttgttggtcccccatggataggagagaaaccaggcctaggctcccaaagtacagcaggggcctggaagcatctcccagggttgaggggtcagtggaggagagctgttctcactgtgaagactcctggggcaaagcgcggtggctcacgcctgtaatcccagcactttgggaggctgaggtgggctgatcacctgaggtcaggagttcgagaccagcctggccaacatggtgaaacttcatctctactaaaaacacaaaaatcagctaggcgtggtggcagatgcctgtaatcccagctactcgtgaggctgagacaggacactcctttgcaacccaggaggaggagcctgcagtgagccaagatcaagcctctatactccagccttcagagcaagactctgtctccaaaaaaaaaacaaaaaacaaaaaccctcagatgtgctctgctggcaaccagtccccctgcctctcctgagtggctgggctgagcgatggggatacagccactctgactccctaccccactgctgtctctgcttccctttctcaggcccagtgatttcttttctttttattatttatttttagacggagtctagctctgttgccaggctggagtgcagtggcgcgatctcggctcactgcaacctttgcctcccaggttcaagcgattctcctgcctcagcctcccaagtagctgagattacaggtgcgtgccaccacacctggctaatttttgtatttttagtagtggcaaggtttcaccatactggctgggatggtctcgatctcctgacctcgtgatccacctgcctcggtctcccaaagtgctggggttacaggcgtgagccaccatgcccggccggcccagtgattctttagcacacactggacacctcctgtgggttctgccccagacacttgagccttcttgggcagccaagggcaaagtggaacaaaaagaccatttttgccagttccgacacgaatacacacataatgcaggtggaaggtctgtcctgccttctgcatcttttgggtgcacaaaaacataaaatcaggcactagagccctgagggaggttggtaagcatgcctggctcctcagccaagaaggaactgtagtgcgagtttcaccaagttctatcagccagacgcatctcgacacaagccctctctaaagccagacccacttacctaccactggctacactgccagttacctccggcaagagctgtacaaggcctccacctctcctctcttgctagaggcccgaaagctaatgaagagcaagtaatcataaaccaagggacaggcggctgcaggttccttgcctgggacttcttggcttctgttccaacactgatttctcaaactagcttgctcaaatgcttttacttccctgaaccagtatgcaatcatgggatttataggaggttcttaaaagtagctctaaaggacagacattttcctttccatttaaaaaactgagccgggtgcagtggctcacacctgtaatcccagctctttgggaggccgaggtgggtggatcacttgaggtcaggagttcgagaccagcatggccaacatggtgaaactccgtctctactaaaaatatgaaaattagccagccacggtggtgcatgcctgtaatcccagctactcgggaggctgaggcaggagaatcgcttgaacccgggaggtggaggttgcagtgagcagagatagatcatgccagtgcactccatcctgggtgacagagtatcaaaaaactgcttatcctttcatctaccagcctcaccaaatgctcttggcgtcaggtgattcactgcaacgttgacttaagggtgcttttaatgccaggtgcggtggttcatgcctgtaatcccaaatcccagcaccttgggaggccaaggcaggaagatcattgacatcaggagttggagacaagcctgaccaacatagtgcaaccccatctgtactaaaaatacaaaaattagccaagcacgtggggcctgcctgtaatcccagctactcgggaggctgagacaaggggatcacttgaatccaggacgtagaggttgcagtgagccaagatcgcacccctgcactccagcctgggtgacagagactatctcaaaataaaaaagagtgcctttaattattaaatcgaagcaaatgtctttaacaattaagaatatacttaaccgggctccttcttgtttgctgatggtaacctccggggattctctctctgtttcagagggccccccccacaggaaacttcgcagtgatgcaccaggtatcatgccttcagcttcgcagctgtgtgttgtctcagtatccatttcttttctgcccaatgcgcccctctgcccaccccaatttttaaacccttgcacatttccacgagattcttgcaaaatctggaggcttggatatctttgtgcaaagctttcattgaaaccaagatcaggatgacaaatagacctcatctcttgacccactgtccttcctgcctctgggcagcacatgtgacatgacacccaacagtgtgcgcccttatcactgcatcttgacgagatggcagaggctgtgtgtgtagcttggatttttcttcctttcataccaaaagccactcttacgtggttagggcactcagcagtgctgtcctcccttgtccagtgaagacactgcactgaatgaatatgacagttccactatctgggcacattcctggagaacgtacttggcttctagttggctggtctgggtcacaagtcagagatcacaaagttcacggtaactgcggcgcggcaaccagtcctcccatgattcagctttcacaggcttgtctgcgaaggaaatgagctcactgcgatgtctgacaaatgccgggggctgcacgtggcttgagtgatgtctagctacaaactgcattttcagcacacggggtggaagctgaccaccgcaaagccaagcacagtcctggcagagccttttctggaggcttcacgggcatgtacatgttcagggactggggagtggatacccaagactcaaggatgcacacagggcccttcccaagaaagcatgaagaggtctctgctgctctgggattttgcttttttttttttttttttttgagacggagtctcgctctggagtgcaatggcgcaatcttggctcaccgcaacctttgcctcctgggttcaagcgattctcctacctcagccttctgagtagctgggattacaggctcccgccacctcgcccagctaatttttgtatttttattagagacaggatatcaccatgttggccaggctggtctcaaactcctgacttcaggtgatccgcgcgccttggcctccccaaatgctgggattacaagcatgaccaacttttcacaggtgaagttaggccatgtggatctgacttcacctcatggagaggccaaaccaaccctcatttgtgtccatcttcatttttggagaatctcagctttgctgtcactaccaaaatacttaaagcgcagggtgaggtcttgttaagagccagttttgtgggggagcagatgagtttctaggacacttcaagcagctctcctaccagctgattgggatcataggataagccaaattccagggtgggctgaagtgcagaacccactggtcagtgggaaactgagtccttgcaaactagcaggtgcttacactcaagatgattcccgaggccttggataagctgagtccacgaatagaatccaaatgctaggccaggcacagtgggtcatgcctataatcccagcactttgggaggccgaggcgggcagataacttgaggtcaggaccagcctggccaacatggtaaaaccccgtctctcctaaaaatacaaaaattagccaggagtggtggcatgtctgtagtcccagttacttggaaggctgaggcaggagaatcgcttgaacctgggaggcagaggctgcagtgagccaagatcacgccactgcactccagcctgggcaacacagcgagactctatttcaaaaaaaaattccagattctccaggatcagaccctttaagaaaacctttaggggggtcccttagttcctgtaacaggtatagttggtgtcaaccttggtctaggatttgaaaccagttccaagaaaagcacttcagccaaaacagagtatcttgcaggctgacagccaagcaaggagcttcaacggcccagggcacaatgtatttcttaggtcaagggagcaaatttatccattaagcttttccagttagcaaatagactcttccaagagccaaaaagagagtgcctagagcactgatgtggaggttagggactacttcccagctcatcagatttttttttgtttttttttttggagacagtcttgctgtttcccaggctggagtgcagtggcacaacgttggctcactgcagccttcacctcctgggttcaagcaattctcctgcctcagcctcctgagtgactgggattccaggcgcctgccaccacgcacggctaatttagtatatttagtagagacggggtttcaccatattggccaggatggcctcgaacaactgacctcacgagtgatctgcccacctcggcctccccaagtgctgggattacaggcatgagtcgcagcaactggccaacccatcagggtttgaacctggagttaaaactgtgacgaagagagctgtgtggggagcgtacagggaacagtcaaactgctgctcctctgcgctgaatttgagcatccttctgagtcaagcgcttggaaaacagtgctaaaaaagaaaaagacttaagggtcacatctagagagagaaggatggagagttctctagtagggctgcaagtccagaagcttctctgtgaagctgggctaggagtgtttactttgaagtggctgcagctttaagtatttattcctgatcgctgcactgcgggaagtcccatcctttatagccaggtgggctttcccagccggggtctctcccatcctctgtcaacaaaagggtcatttgcgaattcctcttctcagtgatcatgaatctctgggccttgatttttttttttttttttttttgagacggagtctcaccctgtcgcctaggctggagtgcagtggccacatctcggctcactgcaagctccgcctcctgggttcatgtcattctcctgcctcagcctccctcccgagtagctgggactacaggcacccgccagcacgcccggctaattttttgtatttttagtagagacacggtttcaccatgttagccaggatggtctcgatctcctgacctcatgatccgcccgcctcagcctcccaaagtgctgagattacaggtgtgagccaccatgcccagccgagttgttccttttgactaaagaattggtcactgagttgtgttcatccttatggcttcttatccaacccttgcgtggggagcaaaagtctgctctcttctttgatgtcctaaaataagacctgtcttccgattcaggtcaaacagggccagatggccagagcccaacataattatttgttgcggttgctgaaaagagttaagtgtttcttctgaacggtgaaggctggcagcaggcagatctgatttttccttcttctgcccactctcttcctcctacccaaagtctcccctcacgtgaccagcccttcctgtgaagtcgaggtgataaactcaagagagaaccagcgcagagaggagatggcagcattaaggagagacaggggtgtcctactggctggagctaaaatccacctcagaggccaggtgcactggcacacacctgtaatcccaacactttgagaggctaagacaggtggatcgtttgaggccaggagttcaagaccagcctgggtcacatggcaaaatcccatctctgctaaaaatacaaaaattagccaggcgtggcagtgtgcacgtgcatgtagtcccagctactcaatactgaggctcaaggactgctggaactcaggaggcagaggttgcagtgagccaagatcatgccactgcactccagcctgggtgagagagactcttaaatttcttttttaaatccaccttgaaggccaggtgtggtggcccacgcctgtaatgccagcgctttgggaggccaaggtaggagaactgcttgagctcaggagttccagaccagcctgggcaacaatatcaagacctcatctcaatttaataaaataatccaccttggattaacacgtataatttccttttctaatattcactgggcacctgttttacgccatgtgcggtatgttccacgatcagcaaaacagatgcagcagtccctgcagtggggaaaactcagtccatgaacattcacaccagcagggggtgctgtctcgccttttaaccagggagcccctctgtgtccttctcaaggctgcccttgtccatttcaccttcttccaattcaaatcttgaaaactcacctctaaggcgaatgggggtgaggagatacagaagaaaaacagtatgttctctcttcaactctgccccatgggctatgaataaagtcagaagacaaaatcccctgcttggtttttggcgtttttttcctattctaaatcaaagaccacagcagaccagaatcctgtggcttctcaaatgaccaagcctgacatattgaaaagcagatcgtcttgctttgaaaaaccttctccacccacccccgcaaccaatttcagctgattaaattcaatcactcatgccttaagactggcaatgatttgttgacttcaacttgaatatctgcatcttatttgtgccgtgtgtgttttctgccataaaaaaaatttatattgcaataggactatagctacaagtttaaaatagatttataaaaaatctatcccaaccatgaagatttctttgctaaataatgtgttttcttacaacccacaggcgaggaaacgagacctctttcgttccttctagaaggtctggaggacgtagagttattgaaaatgcagatggttctgaggaggaaacggacactcgagacgcagacttcaatggaaccaaggccagtgaataagcaactttctacagttttgcaccacggcaagaaaaccaaaaaccaaaacaaacaaacaaaaaaaacccaacaacaacccagaacaaagcaaaacccagcagactgtacttagcattgtctaaatccattctcaaattccaaatatcacagacacccctcacacaaggaatataaaaaccaccaccctccagcctgggcaacgtagtaaaacctcatctatacaagaatttaaaaataagctgggcgtggtggtacacacctgtggtcccagctactagggaggctgagccaggaagaacgctccagcccaggacttcgaggctgcaatgagctataattgcatcattgcactccagcctgggcaacagagaccctgtctcaaccaccaccaccaccaccacccctactacccctgtattcaaggtaaaaattgaagtttgtatgatgtaagagatgagaaaaacccaacaggaaacacagacacatcctccagttctatcaatggattgtgcagacactgagtttttagaaaaacatatccacggtaaccggtccctggcaattctgtttacatgaaatggggagaaagtcaccgaaatgggtgccgccggcccccactcccaattcattccctaacctgcaaacctttccaacttctcacgtcaggcctttgagaattctttccccctctcctggtttccacacctcagacacgcacagttcaccaagtgccttctgtagtcacatgaattgaaaaggagacgctgctcccacggaggggagcaggaatgctgcactgtttacaccctgactgtgcttaaaaacactttcactaataaatggttataaatcacaatgtcgttggcttttctgttgagctgttttctatagaggaaaaggagttggggaaggctgggttttgcttcatcgtcccaaagattctctgaagtcagggttaacgtcatgaatgcagaaactgaggcctagagaggtgaaatcaattgcctacaaccccacagccagccagagagcagagcagagatgcaaagtgagactgtctaagggggttactgggccgctcagcagggagggcaggggagagaaataaggtgatgtgtggtctaagggccactgccccctgccctcgaacatgactgggaagaacatcttgactcatcaaaaccagtatcttaagaaaaatacaggatttccttgattttttgagttaaaacacaaggtcttgtccaatgagtcagcaaacactttccacaaaacgtcagatggtggctgggtacagtggctcacacctggaatcccagcactttgggaggctgagatgggaaaatcacttgaggccaggagttggaggccagcctagccgagagagacccccgtctctataaaaaaaaggtgttttttttttgttgttgttagtaagccaggcaggatagtgcacacctgtactcccaacctcttggaaggctaaggcaggaggatcatgtgagccaggagttccaggctgcagtgagctatgatcacgccactgcactgcagcctaggtaacagtaacaccttgtctctcacaccaccaccaccacccacccagccagatagtattttagcctttacaggctacatatggtcttgccgaatattcatcttctttaaaacaacccttaaaaacataataaatcattcttagagtaagggccataaaaacaagctgtaggccctgtccttctttcagcttgagtgttttagacagacatgcctgcaaaggctctgttcaacacaaacgatgccgtataccaccaactccatgggatcagacagatttgggagacaggaaacatggaaacaaaggactccatcttgtgaccagatgctaatatgccttgaatgacgcacaaacacatcccggatacatttctaaaaacctggcttgaatagaaattttcaaaaagattttttcatattttttaacttggttaaaaaaagtttttcaccactctgtgggaaaacattaaagtataaacatacaaagcctctttgaccagaagcccaacaagttcaacattcgtttctcttgattttattgatcttttaaaaaaataaaaggacatcttctgtggatacaggttaggatgtttctagggtaagaaacccaccatcgcagcgtaattctctgcggaatttcagtagcacttggaaagttctgttttcaacctgaaatttttgctgttcttccagaaaataacttagtaacaaaatgaaggccgtgaagctgcaggcacactccagaaattagtgtgttcttttaactcgtgtcccaaagagacagcagttcctaacatgcagtgatgagtggacacaccatggtgcgttggaaatcccacgttcacgtctttgacaaggaagcctcctacaatgatcttgtgctttaattttacttgatggtcaccctggttacttcattatgcctttgaatgaagtcctgttcttagtggctgcattaccaaggccatcttgccccaaagacccctcagggtcctgaggcagaattccccccaccccaccaggggactcaggaaaatgaatgatcgcagtttgccaaaagaggtcagatttcccactgacgctggttggtctggaaaattactctgaaaactcgaacgcacctctaggaatctcaatgagaagctaagaagcaggctacagtctcagaggtttatgacacctttttttttttttttggagacggagtctcactctgttgcccaggctggagtacagtagcgcgatcttggctcactgcaccctccacctcccgggtccaagcaactctcctgcctcaacatctggagtagctggaattataggcacgcaccactgcacccagctaattttttgtatttttagtagagatggggtttcaccatgttggccaggctggtcttgaactcctgacctcaggtaatccacccgcctcggccttccaaagtcttaggattaccggcctgagccaccgcgcccagcctattccagtttttaaaaaggcatgtgactgttaagttctctgttcttagacatgatttcagtacaccacaaagcactgggagattttgttctggaagacgattccacctggttgggagttggggggaagagcctctgagagaagctccatcccacatttacggagacttgggacattaaaaacacctgtcaagaccaatcaggggccaggcacggtggctcaggcctgtaattccagcactctgggaggctgaggcgggaggatcacttgaggccgggagttcaagaccagcatggccaacatggtgaaaccccgtttctcactaaaaatacaaaattagtgggtgtagtggcacactcctgtagtcccagctacttgggaagctgagataagagaatcgcttgaacctaggaggcggaggctgcggtgagccgaaattgcaccactacactccagcctggacaagacagggcaagagcatgactctgtctcaaaaaagaaaaaaaaaaaaaagaccaatcaggacctccgcttgggttagtgcaacacaatggggcatgggaacgatggctcatgcttgaaatcccagcattctgggaggccgagatgggaggatcacttgaggccaggagttcaagaccacactgggcaacatggcaaaaccccgtctctattaaaaatacaaaaaattcagccaggtgtggtggtgggtgcctgtaatcccagctacctggaagactcaggaacaagaaccgtttgaacccaggaggcggaggttgcagtgagctgagatcacgccaccacactccagcctgggtgacagagcaagactctatctcaaaaacaacacggtagcctcatcaccgacaacttagagcccttcccagagagccccttttgtccctctttgcaatgcacacggtggcaggtaaggatgaaaagacatttcccagggacaaaccccagagcacaggtgatggcctcggtcattggcttgggccgcaaagctaactaactatggtgactgctcttatttctcaaactaacttaaaacaaaaacctagtgtaaaaagacgacaaaaggtaacgacttccgcaccaacaccaagaccttcagcttccgtggttttcctaaagcaacatcttgactaccccctgggctgacggcagcggcgatgaagacatgtgtgaaggcggcttcccaaattccaggcgcttccccaaccttcagacagagcaaaccaaattaagctgacataacagctgtgacaaactggctagcaccggggcccagagagttataagggtgaacatcaagagtcaggagcagggtctcacagggtctcaattttctctcctgtgaaatgaagaagaggacactggctacctggctctcagattccaaggtcacacaaaacgcccagtctcagacccactagaaaaatccatctcttacctattgtttgtttgttttacagcctacgcaacatagtgagaccctgtctctatgaaaaatgcaaacaaaaattagctgggtgtggtggcctgcatgtgtagtcccagctacttggtaggctgaggtggaaggatcgctggagcccaggaggcggaggttgcagtgagccgagatcacaccaccgcagtctagcctgggtgacagagtgagaccctgtctccaaaaaaaaaaaaaggccaggcatgattgctaacgcttgtaacccccagcacttgggaggtcaaggtgggaagatcgcctggaaaattaatctgaaaactcacctctagaaatctcaatgagaagcagactacagtctcagaggtgtattctcaaactcaaagccaggaggtttgagaccagtctgggcaacatagcaagactgtttctataaaatataaaaaaaattagccaggggtggtggtgtgcacctgtagccccagctacttgggaggctgaggcaggaagatggcttgagcccaggaggacgaggctgcagtgagctatggtcgcaccactgcactccagcctgggtgacacagcaaaaccctgtctcgtagaaagaaaacaaacaaaaattaatttttttttttttcttgagaaagagtctcactctgttgcccagagtggagttcagtggtgcaatcttggctcactgcaacctccacttcctgggttcaagtgattcttgtgcctcagccacccaagcagctgggactacaggcatccgcgaccatgcccggctaattttcgtatttttagtatagatagggtttcaccatgttgcccagtttggtcttgtgaactcctggcctcaagtgatccacccacttctgcctcccaaagtgctgggattacaggtgtgagccacttcactgcacctggcctaaaaatccacgtgtaaaggtctcaaagttatgtgcatgccatggaaaatattcttaatttcctgtcacgtgtctgctacaaacccatcaaattcctacggcttggggcccagagagatggtagtcacacaccttgcagaattcctgaatctgaaagctgccccttttttttctgagacaaggtctcgcttcatcacccaggctggagtgcagtggctgggaacacggctcactgcggcctcaacctccagagctcaattgatccgctgccctcagcctcccaaagtgctgggattacaagtgtgagccactgagcctggccctgattttctttaggcaagaaaattaatgacactgttagagatcagatctgcactgtcccatcgggtggctggtttcaggaacatagtctgggctagaagttagtgccagtttctcaaaggttctacagatttaaaaagaaaaaaaagggctggttgcagtggctcacgcctgtaatcccagcactttgagagcccgaggtgggtggatcacaatgtcacgagatcaagaccatcctaacacagtgaaaccccgtctcgactaaaaatacaaaaaattagctgggcatggtggcacacgcctgtaatcccagctactcaggaggctgaggcaggagaattgcttggacttgggaggcagaggttgcagtgagctgagatcatgccactacactccagcctaggcgacagagcaagacgtctcaaaaaaaaaacaaaacaaaacaaaaaaaaaaacttcaggggaagcagagccatgactgatgctcaattccccaaataagggctttatttttatttaactaattaattaactttttgatatggagtcttgctctgtcacccaggctgctgtgcagaggcacaattttggctcactgcaatctctgcctccagggttcaagtgattctccttcctcagcctcctgagtagctgggactataggcacatgctaccatgcctggctcatttttctattttttttggtggagatggggttttaccaatgttgcccagactggttttgaactcctgacctcaagtgatccacctgccttggcctcccagactgctgggattacaggcgagcgtcaccacacctggcccaaataagggcttttatacaggacattctcacagtgtaaccgtgagtagcagctgtagaatcaaatgataaaaatgaccttcttggccaggcatggtagcccacacctgtcgtcgcagcactttgggaggatgaagggtgaggatcacttgaagctcagagtttgagaccaaactcggcaacatggcaaaacctgtctctagaaaaaatacaaaaaattagccgagcacggtgacacgcacctgtactcccagctactcgggggactgaggtgggaggatcgtttgagctgggaggcagagggtgagccatgatcctgccatcgtattctagcctaggtgacagagtgagaccctgtctcacaaaacaagaccctctctctagccctttgttcaagccacaagacaccacctaatgctgcctgcagggagcagaggagaggataaggtttgctgaaataatcctataatttaaaaagacacatggctgtgggctgggggtgagtgtctcttgcctggggcaggcgggttctccccgccagcgagaggtttattagaaggtactgaccccttatcacccaaaggcacgctggtgctgcttggccgtctctccccgccatctctgttcttgctgctccgcccagaggctgggccacctgttcggtttggggactgatcgtacacgaggttccggcaggaagcgagtttggactccagtgcctggacagaaatacacttttatctctcaagttataggcaaggactattctgtcttaccagagcctgtacagaagaacgaaccccagacagtggttctcaaactgttgtgcactggaattccaaggtgggaccccaagaggaatccaacgtatatgccagtctcagaaccaagcaccttaagtatttgggagctggctgggcacaatggctcacacctataatcccagcactctgggaggccaaggcaggaggatggcttgacatcaggagtttgagaccagcctgggccacaaagtaagatcccatctcagtttttttttttgttttgttttttacttttttagacgctgtgtcacccaggctggagtgcactggtgagatcacagctcactgcagcctcaacctcccaggctcaaccaatccctcccacctcagcctcctgagcagctggaattataggcatccgcaatcatgcccagttaataaaaaaaatttttaatgcaaaaaattttttttaattacgaaaaattttttaaaatgtttgggagctgcctggaaaaagatcacggctcactgcagcctcaaccaatccttccacctcagcctcctgaatagctaggactatgcacaatcatgcttggcttaaaaaaaaaaaaaaaattcttttttaattacaaaaaattttttaaaatgggagctttctggaaaaatcactaacctaccaattatccaactccgcttgtaggaagtaggaaatccacttctggaatccttcaccctttggtttaccttgttaaacctctgcagaatggcaagaagtttggtaaggacttggtctggctacaacagaccctgaggaaaccaaaaggacactgacagcaccccaggcttctctatactccaactaggctaaatactgaaatgcagacctgcttctagaatagcaaaccagacagccaaaaaccagaagtaaaaacaaaagaaatgagttgcaagcttctattaagttgtagctacaaatacactgtgtacagtgacaacttggtaggagttaaattatgtggccttctaggcatcatttttaaaaataaactacaaagaatacctatgtttttacttaagcacaaaaggatccctccctgtaattaacataaaagctgaaaggccaaattctttgccctaggctttcaagattttttttttttttttttttgagaccaagtctcactttgtcacccagcggtgcgatctcagctcactgcaacctccgcctcccggattcaaacaattttcctgcataagcctctcaagtagctgggatcgcaggtgcccaccaccattcctggctaatttttgtatttttagtagagatggggtttcaccatgttggccaggctggtcttgaattcctgacttcaggtgatccacccatctcggtctcccaaagtgtcaaaattcacttaaaccccaagaaacaaaccaaaaaaaaaaaaaaaaaaaaaaaaggtggcagtttttttctcttctgagacaacgtcgtgctgtcacccaggatggagtgcagtgttggaatctcagctcactcagcctcaacctcccaggctgaagcaatcctcccacctctcagcctcctgagtagctgggaccaccagtgtacaccatcaggcctggctaatttttgcattcttgtagaggccaagtcggggcagggggtttcaccatgttgcccgggctggtgtcagactcctgagctcaagtaatctcccaccttggcctcccaaagcactgggattacaggtatgagcacccggccaaaagagaaggcagtttccaagtgctccttaatttttcgagttaaggaaaaaacacacatatcaccctaatttcccaaatttcctagaggaaaaacggtaaaaggaaagagacatacatagggttcagagcagggcttcgagtcagagctctgagtgtctggcagtaactcccacaggaagctctaatgattcccagggatgctaaaggagcagccacacctaaaactcaccacactgctatgaaaggggctggacgcattggctcatgcctgtaatcccagaactttgggaggccaacctgggaggatcacttgaggccaggagtttaagaccagcctgggcaacacagcgatacccacattactacaaaaaaatgaaagtatcagccaggcatagtggcgcacacctgtggtccaagctcctcgggaagctaaggtgagaggatcgcttgaacccaggattttgaggctgcagtgagttgtgatcataccactacactccagcctgagcaacagagcaagaccctgtctctaaaaaaaaagaaaaaaagaagagagggaaggaactagatcaacccccttcacacatcctgaaagacaggcaggaaggcaccaaacgccaggaaagtgtggtcttaccccgactttccgcagtaggtctcccacaatgttgagggctgatatccgggccgcaggtgtgaggggggtccccccggtggagtcgtccaggcctgggtgtgcaaagggaagagcatgtaactcaccaacctatagtcatgtctgtgcgttaacatcgctagatccaaaaccacgggacaggagggacactgacgcctttcctcggatcccaaaagctaccctatttctttccgtagttaaccgcatcacacacccaaggcccgtatgacaaccaatttttcaagtccttgtgatgactgcaacaaatacttatttttacatgttagtcttgctctgtcacccggactggagtgcggtgatgtgatctcagctcactgcaacctccgcctcccaggttcaagcgattctcctgccttggcctcttgagtagctgggattatagccatgtgccaccacacccggctaatttttgtatttttagtagagacagagttccatcacgttgtccaggctggtctcgaactcttgacctcaaatgatctgcccgccttggcctccaaaagtgctgggattacgggcgtgagccaccatgcctggcctttaacaaattttttttttaatagagacagggtctcactatgttgcccaggctgatcatgaactcctagtttcaagcgatcctcccaccttggccgcccaaagggctggtatttacaggcatgagccaccgtgcccagccacattagtctttttaaacaaacccaaaacaaatccttttgaaattgtagaaaatccatatagttaattaacataatggcatctgtgatagatacaagaactatagacaggatgatccagctttacaagggtcccgctctgcagagcctctcttctccaagtggggtccatgcaccagcagcacatgagaactgttagaaatgcagaatctctcggccaggcacagtagctcacacctgtaatcccagtgctttcagaggccgaggcagttcgatcagttgaggtcaggagttcaagaccagcctggccaacatggcaaaatcttgtttctactaaaaatacaaaattagctgggcatggtaacaggtgcctgcctgtaatcccagctactcgggaggctgaggcatgagaatcgcttgaatccaggaggcagaggctgcagtgagccaagatcaatgccgctgcactccagcctggccgacagagcaagactttgtctcaaaaaaaaaaaaaaagagagaaagaaatttcaggccccacccaagacccacttgatctgaggtacattctaccaagatccccaggtaagctacatgcatattgaagtgtggaaacatagccaggcatggagttgcatgcctctagtcccagctactcaggaggctgaggcaggaggatcactggagcccaggagttggaggctgcagtgagctatgattgcaccactgcactccagcctgggccacagaccaagactgtgtctctaaaaacaacaatgaaataaagtatgcaaaatggctctagactggggctaggcacagtgactcatacatgtaataccaccactttcaggggctgaggcaggcagatcacctgaggtcagtagtttgagaccagcccggccaacatggtgaaaccccatctctactaaaaatacaagattagccaggcatggtggtgggcacctgtaattcaagcttactcaggaggctgaggcaggagaatcacttgaacctgggaggagggggttacagcgagccaatatcgcaccattgcactccagcctgggcaacagagcaaaactccatctcaacaaaactaaacagaagggctctgcaccggaattctagaagtctcactggtctcttcatgcccaggggacaagctaagggataaggtagtagatggtagggtaagccctggagcctgcctgcctgggtctgaatcccaaaccatctgccattcaattgcttcatgactctgcttaactcagagcctcactttcatcaaacggggacagcacctgcatcctgggcctgcggcgaaggctgcaggctggccagcacacactgagcactccttaactgtctgttattaatatctgctgtaaaaggcctgatcggaagctgtcagcagaggggctggggtgagaactgagattctttttttctgcccatgcagcacacgttacgctgagtctagctctcggtggatgtattactaaacccacagaacgctttttacttttttgtatttggtcagtgacatttcaaatttgggaggttttatattcaacaagaggatttttgaccaggcgcggtggctcacacctgtaatcccagcactttgggatcagccgaggtgggcggatcacttgagtccaggaatttgataccagcctgggcgacatggcaagactgtgtctccacctaaaatacaaaagttagccaggtgcctttagtcccagctactccggaggatgaggtgggagaatcacttgagcccacgatgaagaggttgcagtgagccaagatcacgtcactacactccagcctgggcaacagagtgagatcctgtctcaaaaaaaaaaacccaacaaaaaaaaagaggatttctggctttgaagaatggaaaaagctgcagatgaagggccaatcctcgtagctgcagagtggcagccacccgctctgggtggggtttccatttcatcagactccactactgcctcttacccagtcctcactgatctcaatgcccatccccaagaacatcccagtctactctctgctcaaagcctgagagcaaatcaggctctgagcctgatgcaaatcatcacacccccaggacccaccccagattcttacccagaaacactttgtgaaccgagaaaatcctgcaattcccactccccttaccacgtctgaagctcccaggtgtgtttaaacttgagctgggtcctcggtgagcaatgggcgtggacggcacggagcccgtggcctgcacagctgtgtctgtcctctcagcttccactgagctgggcatgggggtcctgggtttctcctgcttctgctgcacggccagttcctgccgcaaatctgtgccagaaaaaggattcaggaattcaagtcctcagccaggcgcagtggctcatgtttataatgccagcactttgggaggccaaggcaggtggatcgcctgaggtcaggagttcgagaccagcctgaccaacatggtgaaacctcatctctattgaaaatacaaaaattagcccagcatggtagtaggcacctgtaatctcagctactcaggaggatgaggcatgagaatcatttgaacctgggaggccagggtggcagtgagctgagattgctccagcgcactccagtctgggtgacaagagcaagactacgtctcaaaaaacaaaaagggaatttaagtccttgcttagggttggtggggtgcagggagagaggttcaacagtagataccagtcagaaaaaagacctactggggtgaaacactccaggtagaaaccccaaataaagggaaacccacaggaccttgcctagcagacttggaactctacaggatgtttctcttgactaacaaaatggtttcagatttttaaaaagctatgacagtgacacactaatgcttttattattgaaaaaacaattccaacatagcagtgtatttagaacactaaatgaaaatatgcccgggagcagtgactcatgcctgtaatcccagcactttgggaggctgaggtgtaagaatcacattaatccagtaagtcgaggctgcagtaagccatgatcataccacttcagcctgggcgagagtgagacctctggctcaaaaaaaaaaaaaaaaaaaaaaaaaaaagaaaaaaaaaaaaaaaggccagttgcactggctcaagcctataatcccagcactctgagaggtcgagatgggaggattgcttgaggtcaggaattttcaggccaacatggcaaaaccccgtctctattaaaaatacaaaaaattagccatgcgtggtggtgagcgcctgtagtcccagctgcttgggaggctgaggcaagacaatcgcttgagcctgggggacaagcagtgagtgcagtgagctgagatcacgccactgcactccagcctgtgtgacagagcaagactgtctcaaaaataaataaagtatgctttccagactatccccaaatgctcctcctcactcatcatcaccataacatgtgggagagcttttcaaccattgttctctgaatttttttttttttttttttttgagatggagtttcactctcttgcccgggcttaagtgcagtggcacagtctcggctcactgtaaatctgcctcccgggttcaagtgattctcctgcctcagcctcccaagtagctgggattacaggcacgcaccaccacacctggctaatttttgtatttttagtagacacagggtttcaccatgttgtccaggctggactctaactcctgacctcaggtgatccacccaccttggcctcccaaagtgctgggaatacaggcgtgagccactgcgcccagctgttctctccattttcaaacataaactttatacatatgtatgtatctactgagcataaaacaagaaaattttttattaagcattactggaaacatacaatatgttgtcctgtgtatgacttactctccccacttcagtggtatgtcttggcaatgatttttgttttagagacagggtctgactcagtcacccaggctggggtgcggtggcacaatcatagctcaatgtaaccttgaactcctgggctcaagtcatcctcccacttcagcctcctaagtagctggaactacagacatatgccaccaggcctaatttttacaattttcatttttgtagagatggggtatcactatgttgtccaggctcatcttgaactcctaggctcaagcaatcctcttgcgtccgtctctcaaagcactgagattacaggcatcagccactgtgcctagccttggcaatctttctaccacaacatttctatctactgttcattttaaccattaacatttcacaaaatacatctatgtacttcatttaaccacttcattactgatggacatctaggaacaactactttattaaacttaagaatttttactttttatcccccacctactggttacacattagaaagcaaatcgacgttataaataattaattgggccagcaacagtgacccacccctataatcccagcactttgggaggccgaggcaggcagatcgcctggggtcaggagttcaagaccagcctggccaacatggtgaaaccccatctctattaaaaatataaaaattagccaggcatggtggtgcacacctgcagtcccagctactcaggaggctgaagcaggggaatcgctgaacctgggaggcagaggttgcagtgagcagagatagcaccactgcactccagcctggacaacagagcaagacgccatctcaaaaaaaaaaaaaaaaaaaaaaaaaaaggtaaaaacaacttggacaatccactaatgaatgtcttttttttttttttttttttgagacaagagtctcactctgtcacccaggctggagtgcaatggtgtaattttggctcactacaacctccacctcccaggttcaagcaattctcgtgcctcagcctcctgagcagctgggattgcaggcacccaccaccataccctcatgttttctatttttagtagagatggggtttctctatgttgtccaggctggtctcaaactcctgagctcaggtgatccacctgcctcagcctcccaaagtgctgggattacaggtgtgaaccactgtgcctggccaaatgcctcattacagtttcaacattctacctctggaagtgccaactgaaaaagagcaaatgctgatgaggtttcaaagttttagccaaatatattggttgccatcaagtcacaaaaataataggctagctggcaattccaccagaaatttctccccacaacatctttgcttcttaagagacagggtctcactctgtcacccaggctggagtgcactggtgccatcatagctcactgcatactccacctcctgggctgaagcaatcatcccaccttggcttcctgagtagctgggactacaggcacatgccatcacacccagctaatctttaaatgtttttgtaaagatggagtcccactatgctgcccaggctggtctcaaactcctgggctcaagagatcctcggcctcccaaagtgctgggattacaggtgtgagccactgtgccagatctccccacaaaactctctgttcctactgagcatcagggtagtttgctgtgtttgtgaattacagaccaggaagcatctttctggaaataaattctgctgcccagaggcagaatcccaatacaaggacttcatctgtgaaccccaaagctatttctctaaatacccataaggggcccttacagggctggatgtctgactgttctcagctccagccagggcccaaggcaagagtctgcccagtgcagtccgacaccctctgattagacaacctgggtgcagagcagggtgtggggtccctgtaaagataatgctgggagagcttgtgggacaagatgttgctcaggtagggagaggggaccatgctggtgaagacaccaaggcctcctgacctctggcttcatccttcagtctctgaacagattccaggagattctctttttcatcaagttcactttccaggaaggcatttctttcgatggcctgattcaagcgctgctcaaagtcttcgagagacatgatcgtggcgctggcgaagagaaaagcagagttatccaagaggacaaaccgcagcatccctccagcaccgcggatccaggaggtgcgaagggtcagacacacctgggcacaagtcccagccccaaacttcctagatgccacagagtgggccaagtcccttaaccttctggggcatgggctctttacctgcagaatgggactcatcatagctcatggggtgcacgaggctgtcatgaggattaaataagatgctgcccacacagcactcagcaataagccaaagccctatcaggactgcatgtggcatttggtggtttgagaagaccactatgctccatcttctcttgcaagctcacaatgccaaccagcattaaaaataacctaatatgactgggcaaggtggctcatgcctgtaatcccagccctttgggaggccgaggcaggtggaagacctgagatcaggagttcaagaccagcctggcaagctt

SEQ ID NO: 2117 - DNA, 325 bp, Homo sapiens
  misc_feature: n=a,t,g or c
gttcctaacacaaatgtgaatttattggttgatttgatatttaaaatagtacttttacaaaatcatctcagaaaatatactacatttattaaaattcctacaaaccattgcagaaaatattaaaccctctaaccaacctaacactcgctttcnnnggnccctggtgatgattttcacagcttccatagttgcaaagaacaaagaaatcatcttccaacaggggtggaattagataagaataatccaaaanatatttatttctttacagactcacagattgcttggatgtttaggggctcttaccctaggataccctaattattca

SEQ ID NO: 2118 - DNA, 6491 bp, Homo sapiens
ccgccccggcgcccaggctcggtgctggagagtcatgcctgtgagccctgggcacctcctgatgtcctgcgaggtcacggtgttcccaaacctcagggttgccctgccccactccagaggctctcaggccccaccccggagccctctgtgcggagccgcctcctcctggccagttccccagtagtcctgaagggagacctgctgtgtggagcctcttctgggacccagccatgagtgtggagctgagcaactgaacctgaaactcttccactgtgagtcaaggaggcttttccgcacatgaaggacgctgagcgggaaggactcctctctgcctgcagttgtagcgagtggaccagcaccaggggctctctagactgcccctcctccatcgccttccctgcctctccaggacagagcagccacgtctgcacacctcgccctctttacactcagttttcagagcacgtttctcctatttcctgcgggttgcagcgcctacttgaacttactcagaccacctacttctctagcagcactgggcgtccctttcagcaagacgatggctgtgctcaggcagctggcgctcctcctctggaagaactacaccctgcagaagcggaaggtcctggtgacggtcctggaactcttcctgccattgctgtttcctgggatcctcatctggctccgcttgaagattcagtcggaaaatgtgcccaacgccaccatctacccgggccagtccatccaggagctgcctctgttcttcaccttccctccgccaggagacacctgggagcttgcctacatcccttctcacagtgacgctgccaagaccgtcactgagacagtgcgcagggcacttgtgatcaacatgcgagtgcgcggctttccctccgagaaggactttgaggactacattaggtacgacaactgctcgtccagcgtgctggccgccgtggtcttcgagcaccccttcaaccacagcaaggagcccctgccgctggcggtgaaatatcacctacggttcagttacacacggagaaattacatgtggacccaaacaggctcctttttcctgaaagagacagaaggctggcacactacttcccttttcccgcttttcccaaacccaggaccaagggaactaacatcccctgatggcggagaacctgggtacatccgggaaggcttcctggccgtgcagcatgctgtggaccgggccatcatggagtaccatgccgatgccgccacacgccagctgttccagagactgacggtgaccatcaagaggttcccgtacccgccgttcatcgcagaccccttcctcgtggccatccagtaccagctgcccctgctgctgctgctcagcttcacctacaccgcgctcaccattgcccgtgctgtcgtgcaggagaaggaaaggaggctgaaggagtacatgcgcatgatggggctcagcagctggctgcactggagtgcctggttcctcttgttcttcctcttcctcctcatcgccgcctccttcatgaccctgctcttctgtgtcaaggtgaagccaaatgtagccgtgctgtcccgcagcgacccctccctggtgctcgccttcctgctgtgcttcgccatctctaccatctccttcagcttcatggtcagcaccttcttcagcaaagccaacatggcagcagccttcggaggcttcctctacttcttcacctacatcccctacttcttcgtggcccctcggtacaactggatgactctgagccagaagctctgctcctgcctcctgtctaatgtcgccatggcaatgggagcccagctcattgggaaatttgaggcgaaaggcatgggcatccagtggcgagacctcctgagtcccgtcaacgtggacgacgacttctgcttcgggcaggtgctggggatgctgctgctggactctgtgctctatggcctggtgacctggtacatggaggccgtcttcccagggcagttcggcgtgcctcagccctggtacttcttcatcatgccctcctattggtgtgggaagccaagggcggttgcagggaaggaggaagaagacagtgaccccgagaaagcactcagaaacgagtactttgaagccgagccagaggacctggtggcggggatcaagatcaagcacctgtccaaggtgttcagggtgggaaataaggacagggcggccgtcagagacctgaacctcaacctgtacgagggacagatcaccgtcctgctgggccacaacggtgccgggaagaccaccaccctctccatgctcacaggtctctttccccccaccagtggacgggcatacatcagcgggtatgaaatttcccaggacatggttcagatccggaagagcctgggcctgtgcccgcagcacgacatcctgtttgacaacttgacagtcgcagagcacctttatttctacgcccagctgaagggcctgtcacgtcagaagtgccctgaagaagtcaagcagatgctgcacatcatcggcctggaggacaagtggaactcacggagccgcttcctgagcgggggcatgaggcgcaagctctccatcggcatcgccctcatcgcaggctccaaggtgctgatactggacgagcccacctcgggcatggacgccatctccaggagggccatctgggatcttcttcagcggcagaaaagtgaccgcaccatcgtgctgaccacccacttcatggacgaggctgacctgctgggagaccgcatcgccatcatggccaagggggagctgcagtgctgcgggtcctcgctgttcctcaagcagaaatacggtgccggctatcacatgacgctggtgaaggagccgcactgcaacccggaagacatctcccagctggtccaccaccacgtgcccaacgccacgctggagagcagcgctggggccgagctgtctttcatccttcccagagagagcacgcacaggtttgaaggtctctttgctaaactggagaagaagcagaaagagctgggcattgccagctttggggcatccatcaccaccatggaggaagtcttccttcgggtcgggaagctggtggacagcagtatggacatccaggccatccagctccctgccctgcagtaccagcacgagaggcgcgccagcgactgggctgtggacagcaacctctgtggggccatggacccctccgacggcattggagccctcatcgaggaggagcgcaccgctgtcaagctcaacactgggctcgccctgcactgccagcaattctgggccatgttcctgaagaaggccgcatacagctggcgcgagtggaaaatggtggcggcacaggtcctggtgcctctgacctgcgtcaccctggccctcctggccatcaactactcctcggagctcttcgacgaccccatgctgaggctgaccttgggcgagtacggcagaaccgtcgtgcccttctcagttcccgggacctcccagctgggtcagcagctgtcagagcatctgaaagacgcactgcaggctgagggacaggagccccgcgaggtgctcggtgacctggaggagttcttgatcttcagggcttctgtggaggggggcggctttaatgagcggtgccttgtggcagcgtccttcagagatgtgggagagcgcacggtcgtcaacgccttgttcaacaaccaggcgtaccactctccagccactgccctggccgtcgtggacaaccttctgttcaagctgctgtgcgggcctcacgcctccattgtggtctccaacttcccccagccccggagcgccctgcaggctgccaaggaccagtttaacgagggccggaagggattcgacattgccctcaacctgctcttcgccatggcattcttggccagcacgttctccatcctggcggtcagcgagagggccgtgcaggccaagcatgtgcagtttgtgagtggagtccacgtggccagtttctggctctctgctctgctgtgggacctcatctccttcctcatccccagtctgctgctgctggtggtgtttaaggccttcgacgtgcgtgccttcacgcgggacggccacatggctgacaccctgctgctgctcctgctctacggctgggccatcatccccctcatgtacctgatgaacttcttcttcttgggggcggccactgcctacacgaggctgaccatcttcaacatcctgtcaggcatcgccaccttcctgatggtcaccatcatgcgcatcccagctgtaaaactggaagaactttccaaaaccctggatcacgtgttcctggtgctgcccaaccactgtctggggatggcagtcagcagtttctacgagaactacgagacgcggaggtactgcacctcctccgaggtcgccgcccactactgcaagaaatataacatccagtaccaggagaacttctatgcctggagcgccccgggggtcggccggtttgtggcctccatggccgcctcagggtgcgcctacctcatcctgctcttcctcatcgagaccaacctgcttcagagactcaggggcatcctctgcgccctccggaggaggcggacactgacagaattatacacccggatgcctgtgcttcctgaggaccaagatgtagcggacgagaggacccgcatcctggcccccagcccggactccctgctccacacacctctgattatcaaggagctctccaaggtgtacgagcagcgggtgcccctcctggccgtggacaggctctccctcgcggtgcagaaaggggagtgcttcggcctgctgggcttcaatggagccgggaagaccacgactttcaaaatgctgaccggggaggagagcctcacttctggggatgcctttgtcgggggtcacagaatcagctctgatgtcggaaaggtgcggcagcggatcggctactgcccgcagtttgatgccttgctggaccacatgacaggccgggagatgctggtcatgtacgctcggctccggggcatccctgagcgccacatcggggcctgcgtggagaacactctgcggggcctgctgctggagccacatgccaacaagctggtcaggacgtacagtggtggtaacaagcggaagctgagcaccggcatcgccctgatcggagagcctgctgtcatcttcctggacgagccgtccactggcatggaccccgtggcccggcgcctgctttgggacaccgtggcacgagcccgagagtctggcaaggccatcatcatcacctcccacagcatggaggagtgtgaggccctgtgcacccggctggccatcatggtgcaggggcagttcaagtgcctgggcagcccccagcacctcaagagcaagttcggcagcggctactccctgcgggccaaggtgcagagtgaagggcaacaggaggcgctggaggagttcaaggccttcgtggacctgacctttccaggcagcgtcctggaagatgagcaccaaggcatggtccattaccacctgccgggccgtgacctcagctgggcgaaggttttcggtattctggagaaagccaaggaaaagtacggcgtggacgactactccgtgagccagatctcgctggaacaggtcttcctgagcttcgcccacctgcagccgcccaccgcagaggaggggcgatgaggggtggcggctgtctcgccatcaggcagggacaggacgggcaagcagggcccatcttacatcctctctctccaagtttatctcatcctttatttttaatcacttttttctatgatggatatgaaaaattcaaggcagtatgcacagaatggacgagtgcagcccagccctcatgcccaggatcagcatgcgcatctccatgtctgcatactctggagttcactttcccagagctggggcaggccgggcagtctgcgggcaagctccggggtctctgggtggagagctgacccaggaagggctgcagctgagctgggggttgaatttctccaggcactccctggagagaggacccagtgacttgtccaagtttacacacgacactaatctcccctggggaggaagcgggaagccagccaggttgaactgtagcgaggcccccaggccgccaggaatggaccatgcagatcactgtcagtggagggaagctgctgactgtgattaggtgctggggtcttagcgtccagcgcagcccgggggcatcctggaggctctgctcccttagggcatggtagtcaccgcgaagccgggcaccgtcccacagcatctcctagaagcagccggcacaggagggaaggtggccaggctcgaagcagtctctgtttccagcactgcaccctcaggaagtcgcccgccccaggacacgcagggaccaccctaagggctgggtggctgtctcaaggacacattgaatacgttgtgaccatccagaaaataaatgctgaggggacacaaaaaaaaaaaaaaaaaaaaaaaa

SEQ ID NO: 2119 - DNA, 1399 bp, Homo sapiens
agtgtgaaatcttcagagaagaatttctctttagttctttgcaagaaggtagagataaagacactttttcaaaaatggcaatggtatcagaattcctcaagcaggcctggtttattgaaaatgaagagcaggaatatgttcaaactgtgaagtcatccaaaggtggtcccggatcagcggtgagcccctatcctaccttcaatccatcctcggatgtcgctgccttgcataaggccataatggttaaaggtgtggatgaagcaaccatcattgacattctaactaagcgaaacaatgcacagcgtcaacagatcaaagcagcatatctccaggaaacaggaaagcccctggatgaaacacttaagaaagcccttacaggtcaccttgaggaggttgttttagctctgctaaaaactccagcgcaatttgatgctgatgaacttcgtgctgccatgaagggccttggaactgatgaagatactctaattgagattttggcatcaagaactaacaaagaaatcagagacattaacagggtctacagagaggaactgaagagagatctggccaaagacataacctcagacacatctggagattttcggaacgctttgctttctcttgctaagggtgaccgatctgaggactttggtgtgaatgaagacttggctgattcagatgccagggccttgtatgaagcaggagaaaggagaaaggggacagacgtaaacgtgttcaataccatccttaccaccagaagctatccacaacttcgcagagtgtttcagaaatacaccaagtacagtaagcatgacatgaacaaagttctggacctggagttgaaaggtgacattgagaaatgcctcacagctatcgtgaagtgcgccacaagcaaaccagctttctttgcagagaagcttcatcaagccatgaaaggtgttggaactcgccataaggcattgatcaggattatggtttcccgttctgaaattgacatgaatgatatcaaagcattctatcagaagatgtatggtatctccctttgccaagccatcctggatgaaaccaaaggagattatgagaaaatcctggtggctctttgtggaggaaactaaacattcccttgatggtctcaagctatgatcagaagactttaattatatattttcatcctataagcttaaataggaaagtttcttcaacaggattacagtgtagctacctacatgctgaaaaatatagcctttaaatcatttttatattataactctgtataatagagataagtccattttttaaaaatgttttccccaaaccataaaaccctatacaagttgttctagtaacaatacatgagaaagatgtctatgtagctgaaaataaaatgacgtcacaagac

SEQ ID NO: 2120 - DNA, 3270 bp, Homo sapiens
  misc_feature: n=a,t,g or c
caaaaagtgtgtggaaaggtggattgagggagcgggacccccgcgggacccgagggggcggcaggcggggaacggggagtcagcccgcgctgtgtctcggggccggccggcaggaaggagccatggctctggacgggataaggatgccagatggctgctacgcggacgggacgtgggaactgagtgtccatgtgacggacctgaaccgcgatatcaccctgagagtgaccggcgaggtgcacattggaggcgtgatgcttaagctggtggagaaactcgatgtaaaaaaagattggtctgaccatgctctctggtgggaaaagaagagaacttggcttctgaagacacattggaccttagataagtatggtattcaggcagatgctaagcttcagttcacccctcagcacaaactgctccgcctgcagcttcccaacatgaagtatgtgaaggtgaaagtgaatttctctgatagagtcttcaaagctgtttctgacatctgtaagacttttaatatcagacaccccgaagaactttctctcttaaagaaacccagagatccaacaaagaaaaaaaagaagaagctagatgaccagtctgaagatgaggcacttgaattagaggggcctcttatcactcctggatcaggaagtatatattcaagcccaggactgtatagtaaaacaatgacccccacttatgatgctcatgatggaagccccttgtcaccaacttctgcttggtttggtgacagtgctttgtcagaaggcaatcctggtatacttgctgtcagtcaaccaatcacgtcaccagaaatcttggcaaaaatgttcaagcctcaagctcttcttgataaagcaaaaatcaaccaaggatggcttgattcctcaagatctctcatggaacaagatgtgaaggaaaatgaggccttgctgctccgattcaagtattacagcttttttgatttgaatccaaagtatgatgcaatcagaatcaatcagctttatgagcaggccaaatgggccattctcctggaagagattgaatgcacagaagaagaaatgatgatgtttgcagccctgcagtatcatatcaataagctgtcaatcatgacatcagagaatcatttgaacaacagtgacaaagaagttgatgaagttgatgctgccctttcagacctggagattactctggaagggggtaaaacgtcaacaattttgggtgacattacttccattcctgaacttgctgactacattaaagttttcaagccaaaaaagctgactctgaaaggttacaaacaatattggtgcaccttcaaagacacatccatttcttgttataagagcaaagaagaatccagtggcacaccagctcatcagatgaacctcaggggatgtgaagttaccccagatgtaaacatttcaggccaaaaatttaacattaaactcctgattccagttgcagaaggcatgaatgaaatctggcttcgttgtgacaatgaaaaacagtatgcacactggatggcagcctgcagattagcctccaaaggcaagaccatggcggacagttcttacaacttagaagttcagaatattctttcctttctgaagatgcagcatttaaacccagatcctcagttaataccagagcagatcacgactgatataactcctgaatgtttggtgtctccccgctatctaaaaaagtataagaacaagcagataacagcgagaatcttggaggcccatcagaatgtagctcagatgagtctaattgaagccaagatgagatttattcaagcttggcagtcactacctgaatttggcatcactcacttcattgcaaggttccaagggggcaaaaaagaagaacttattggaattgcatacaacagactgattcggatggatgccagcactggagatgcaattaaaacatggcgtttcagcaacatgaaacagtggaatgtcaactgggaaatcaaaatggtcaccgtagagtttgcagatgaagtacgattgtccttcatttgtactgaagtagattgcaaagtggttcatgaattcattggtggctacatatttctctcaacacgtgcaaaagaccaaaacgagagtttagatgaagagatgttctacaaacttaccagtggttgggtgtgaatagaaatactgtttaatgaaactccacggccataacaatatttaactttaaaagctgtttgttatatgctgcttaataaagtaagcttgaaatttatcattttatcatgaaaacttctttgccttaccagaccagttaatatgtgcactaaacaagcacgactattaatctatcatgttatgatataataaacttgaatttggcacacattccttagggccatgaattgaaaactgaaatagtgggcaaatcaggaacaaaccatcactgatttactgatttaagctagccaaactgtaagaaacaagccatctattttaaagctatccagggcttaacctatatgaactctatttatcatgtctaatgcatgtgatttaatgtatgtttaatttgatatcatgttttaaaatatcctacttctggtagccatttaattcctccccctacccccaaataaatcaggcatgcaggaggcctgatatttagtaatgtcattgtgtttgaccttgaaggaaaatgctattagtccgtcgtgcttnatttgtttttgtccttgaataagcatgttatgtatatngtctcgtgtttttatttttacaccatattgtattacacttttagtattcaccagcataancactgtctgcctaaaatatgcaactctttgcattacaatatgaagtaaagttctatgaagtatgcattttgtgtaactaatgtaaaaacacaaattttataaaattgtacagttttttaaaaactactcacaactagcagatggcttaaatgtagcaatctctgcgttaattaaatgcctttaagagatataattaacgtgcagttttaatatctactaaattaagaatgacttcattatgatcatgatttgccacaatgtccttaactctaatgcctggactggccatgttctagtctgttgcgctgttacaatctgtattggtgctagtcagaaaattcctagctcacatagcccaaaagggtgcgagggagaggtggattaccagtattgttcaataatccatggttcaaagactgtataaatgcattttattttaaataaaagcaaaacttttatttaaa

SEQ ID NO: 2121 - DNA, 603 bp, Homo sapiens
  misc_feature: n=a,t,g or c
tatgaaacaaagttttaatttttattttacatatttatacataaaactttcaaggaaccctctgaatccaacagaatgttaatagcacatctaaaaaggaacttcaggtagtcaacattcacaaaatgttgaaaactgagtaaaatatacatattacggagagctacaacttcactacgaggcaggcatgtattttttgacttgtatagcaccgtcatttacagttcttctttaaaactacagtgaagaatgaaaagtagtcaatgggaaaatactgttccaacttaaaatctctaaacaaataaaaataaagttaaaactactctcttttattaaccatgatttgtggtggtgtcagtactgtacattttttgtaacaatattttattaaaatgcctgatattaagtggcacagtaaaaaattaaaataaattaagaagcaaaggccaatcactggacattaagctcgacttatcaatgactaacactgatatttgtttctgcgccaccttagcaacagctttttaccaccacggaggcaaataaattctagctgttccnggttgaatggctcttcacttgcaggctttcccgccagtgctc

SEQ ID NO: 2122 - DNA, 280 bp, Homo sapiens
  misc_feature: n=a,t,g or c
accacacaagtttatttaaataaaagtgaacacatatgcaggctggtgcccgaggggcagggggtggggagggcaggtgggaagcagacagacaatggggtccaggcagagtttgtntggtgaaccaggctgctggagggagtggctgggggcctcagggcagcgctgggattcantgctngggcagggggccttnggtgggtgagcctggtgccaggaggtcatttccatccctcacatgcccccctccctttccctgaccccctgggcctacagcact

SEQ ID NO: 2123 - DNA, 439 bp, Homo sapiens; identical to SEQ ID NO: 424

SEQ ID NO: 2124 - DNA, 393 bp, Homo sapiens
aaatcaaacctttgatcatgtctttatttagatatagcccatcttgttgcaaaacagatatctcagcaacttacaaaaataaagtacaatagcataaaaaaaaaaagattagggtaaaggtaaaagcagaaagctagaatgaagcgagtctagtaggagactcagcacaattggaaaaaaaagggtctcgaatttgactttgagcttcccagcggccaaaacaaggaagaaaacatgactggttacaagattcctaccaacagttagtctgggactctggtacaaaaacagacctggtttataccttgactctactgcctgttggagacgtgaccctgagcaggttgcttaagctctctgaatttgaggctcatcacctgtaatggggaggaa

SEQ ID NO: 2125 - DNA, 409 bp, Homo sapiens
tttttttttttgttgttaagcttaaatcatctttattcagctcaggagtggggtggctggaacataagcttcaggtccaggaagatgggtttggatggagcctcgggcgacttgctctctggaataatactcaaaacatttaactccgccaagcttcagtgtccttataaaaaatgaggaaacaatactggtcccgtgacattgtgtaaagattgaatagtacataatatgctgtattagaagtgcttgtcaaggttcttggcaaatgataggtgctcagtcaatagcctctgtgtatagtaacagttctggtagtaattttggtagctggggggatggtaataactgtgacagcaacaagtatcttattcccatttcacagatgaagacataagctctgggaaaaaaa

SEQ ID NO: 2126 - DNA, 1081 bp, Homo sapiens
gctgcccgtcctggcgagccgcgcctacgcggcccctgccccaggccaggccctgcagcgagtgggcatcgttgggggtcaggaggcccccaggagcaagtggccctggcaggtgagcctgagagtccgcgaccgatactggatgcacttctgcgggggctccctcatccacccccagtgggtgctgaccgcagcgcactgcgtgggaccggacgtcaaggatctggccgccctcagggtgcaactgcgggagcagcacctctactaccaggaccagctgctgccggtcagcaggatcatcgtgcacccacagttctacaccgcccagatcggagcggacatcgccctgctggagctggaggagccggtgaaggtctccagccacgtccacacggtcaccctgccccctgcctcagagaccttccccccggggatgccgtgctgggtcactggctggggcgatgtggacaatgatgagcgcctcccaccgccatttcctctgaagcaggtgaaggtccccataatggaaaaccacatttgtgacgcaaaataccaccttggcgcctacacgggagacgacgtccgcatcgtccgtgacgacatgctgtgtgccgggaacacccggagggactcatgccagggcgactccggagggcccctggtgtgcaaggtgaatggcacctggctgcaggcgggcgtggtcagctggggcgagggctgtgcccagcccaaccggcctggcatctacacccgtgtcacctactacttggactggatccaccactatgtccccaaaaagccgtgagtcaggcctggggtgtccacctgggtcactggaggaccagcccctcctgtccaaaacaccactgcttcctacccaggcggcgactgccccccacaccttccctgccccgtcctgagtgccccttcctgtcctaagccccctgctctcttctgagccccttcccctgtcctgaggacccttccccatcctgagcccccttccctgtcctaagcctgacgcctgcaccgggccctccggccctcccctgcccaggcagctggtggtgggcgctaatcc

SEQ ID NO: 2127 - DNA, 451 bp, Homo sapiens
agatttttatttaaacacttttattacaatatttaggtggcacaataactaacaagcttctgagacaggaggtaacattctcatagactttgcaactcagccagaagtaaaactcgaaataaatatgtcatttaaagtaactatgaaggtaataataaaaggagtgttgttagtactaagaaggttttcaatgcagggtccaatagctatatttacatatacagaaaaaatgaaattagttactaaacataacaaaaaaaacttggtatacctatagcaatgcatatttaccaaaaactggtgaaaaatatattgagagatatgttaaatatttgctgaaaagaaaactacttgtctgtatgtgaaaccccatgaatcattttacacatcaggaccaaaaaactaactccttttattcctcaaaaatcaaaagtggtctcatctaacccaa

SEQ ID NO: 2128 - DNA, 435 bp, Homo sapiens
tttttttttttttttttgagcaataaagctgtttatttcacctgggtgcaggtgggctgagtccgaaaagagagtcagcgaagggtgatggattatcattagttcttataggttttgggttaggcggtgaagttaagagcaatgttttgtgggcagggtggatctcacaaagtacattctcaagggtggggagaattacaaagaaccttcttaagggtggggaagattacaaagtaccttcttaagggtgggggagattacaaagtacattgatcagttagggtggggcaggaacaaatcacaatggtggaatgtcatcagttaaggctatttttacttcttttgtggatcttcagttactttaggccatctggatgtatacgtgcaaatcacaggggatgcgatgcttggcttgggctcagaggcctgacacat

SEQ ID NO: 2129 - DNA, 338 bp, Homo sapiens
  misc_feature: n=a,t,g or c
gtttaatggaaacctgctgggctggagggagttaggctgaatttcccgacttcctctgccagttattgacacagctctctttgtaagagaggaaagaaactaaacccacccaagggatgatttcnnggggagaggtggagggcagatgtcctgggcaaaccgggcccctctgcccacacacctcacttgatccttttgccaaacttgtcaaactcaggggaactggcttcccagttgcccctttgccatattccaagtccccctcagacttcatgtctctgctcatcagcactgtcccaggatcctggggagggagaacccctggccccatgggaaag

SEQ ID NO: 2130 - DNA, 264 bp, Homo sapiens
ttttttttttttttttttttaaaatgggaaggtttattaaggtttttcctcaagaggaacagccaatctcttgcttcttgagagaagcaattagtgggaaatgtatgtcacaccttgggcccagaaccacaggaggccgcttctcagcatgcccaacgaacatacatcatccccaattcccatttaaagctcattaatgtctacaaaacagaatccacgttgccttcccagaaaacagaactaggaacccagtcaaagcctcca

SEQ ID NO: 2131 - DNA, 424 bp, Homo sapiens
ttttttaacagtggtaaacagtttttattcaggcaatgaaacatggaaaaaatatattagtaatcattataataatttgtgagtataacttttacaaatagttacttgacatataaaaagggaaattactgtgcatataaaatttatgtagatgaatattccacacaacacaatcctgatagcagtagtcaacgcagcactcatccctccagatgaggggctcctcacacacttcatggcacccgtgggaacacagtggaagcagatgtgcaatgaacatttacttggcacattagtataatgggtatctattggcaaacacacacttgctaacagcaatactgaaaagtttactgctacctctgagatttaaaagaaatgcctggatcctatcccgacggctgagaaggaccgaggctgaggc

SEQ ID NO: 2132 - DNA, 466 bp, Homo sapiens; identical to SEQ ID NO: 491

SEQ ID NO: 2133 - DNA, 4763 bp, Homo sapiens
  misc_feature: n=a,t,g or c
cccctcaccccactcaactgccccgggcccccgcgcgcgcggccgcccctccactcaccctgtgtcggccccgctcccctctcccccaccaggcgagcaggcgagcgggcagagcccgcggcggaggtcggcgcggctccggggttcatggtgacgaggcggcggccgctcgagcccagcggcggcgggcggcgggagctggggcgcgggcccgggccgcctctcccagagcgcggggccgggcggcgggcgcgcccaggcagcggctgcgagcgcccccccgcgccgcgcccccgcgccccccgcgccgcgcccccgcgcgcttggcttgcggggggccgggcctgcgggcggccgccgcgccgcgcacccatggacggcccggccatcatcacccaggtgaccaaccccaaggaggacgagggccggttgccgggcgcgggcgagaaagcctcccagtgcaacgtcagcttaaagaagcagaggagccgcagcatccttagctccttcttctgctgcttccgtgattacaatgtggaggcccctccacccagcagccccagtgtgcttccgccactggtggaggagaatggtgggcttcagaagccaccagctaagtaccttcttccagaggtgacggtgcttgactatggaaagaaatgtgtggtcattgatttagatgaaacattggtgcacagttcgtttaagcctattagtaatgctgattttattgttccggttgaaatcgatggaactatacatcaggtgtatgtgctgaagcggccacatgtggacgagttcctccagaggatggggcagctttttgaatgtgtgctctttactgccagcttggccaagtatgcagaccctgtggctgacctcctagaccgctggggtgtgttccgggcccggctcttcagagaatcatgtgtttttcatcgtgggaactacgtgaaggacctgagtcgccttgggcgggagctgagcaaagtgatcattgttgacaattcccctgcctcatacatcttccatcctgagaatgcagtgcctgtgcagtcctggttcgatgacatgacggacacggagctgctggacctcatccccttctttgagggcctgagccgggaggacgacgtgtacagcatgctgcacagactctgcaataggtagccctggcctctgcctgcctcccgcctgtgcactctggaacctctggcctcaggggacctgcctgtcctcagctccctgggagctgaaagtgaggatactccgtgctccaggccacagggtgaatgtggccatgcctacctgttttgtttttttaagaacagaaacaactattttaaaagaactcttttaagaaatttcataaagggacatgcattttactgggtttgcttttcttaaaacataccaaaaaagaaaaaaatagaaaaaaaaaaaaaaaaagctgatctctatcagactcttcaactgtcctccctccaagcagaccacctgtccccttctatcccagctcagagcagctgacccaactcagaatctctttcctacaggatgaaagtgccttttgaatgttatttttaagccgagagttaatttttctacacaacatatttccagacatcttttagtcttttattgtcttagatactataagaagatgaacatgacaattttctagaacctggtagcgtgtgtgtgtggttggcggggggtgctgagggaggggagtgagtcacaggagcctgtcccccaacaggtgtgactgctctgacaacctgtggcatgctgcagggtcaggctcctgataggaggatttcatgactatgtcattgtctccactcatttttgacccagtttggaatgtatctgcaattgtgtggctcaacactttaggaaacatagattattttatattattatttctgatggtgacaagtttgtcttgaggtcacattttctccttgaaaagtgacatcctgtcacttctgctctcacactactgccatacatttgtgtttttttgttgttattgtttgggtagagcagttacaagaaaccctaaaacccttggatataaaagaaatctgtttattgatttttaaatctttcctttccaaaagctggatacacatggagctgtttgggaattttccttgctgctaccgcgctgccaccaaatggaattgaccagcggctgttacactgttctttgccactgtgcctatgctcagaatatgctcactgctaagctacaaactcggacagggtcagaaacagaggtgtcccatcccattgcagcctccaccacctgtaaccccttcctggcattggccactgaagggtacaaaggcaaaaggaccacagcaccacttaggtgtagcatggattttaaactgcagtcagtatcagatcctgtttgataaataagctgactgttctctcttgagaacctgtggcctcaaccagccaccaagctgatgtggcccaagctccatctcttggtcttctcctttgaagcacagcctatttctgagccaagggttggggaagcctgtctagatgtgggactcattgccccaaaccagggagaggaagagctcccacagggagagcccaggctctctttgcagcctttcccagtttggtgtttaaagcagtgccatgttccttgtttgacaacaagacagtctgtaaagtattgctcttaaaaacaattaaaaagaaccctttcatattggcaccattgccttagtcctctgtgggttggtcttcagccagcattctggtgggagtgactggcattaacaagactggaaatcgggggtcaaagtaaaatatctttgttttgctttcattcacaaagtaatgaagccagctgccaattacatcctcccaacagcactttggtctgtgactgctgtgtgatattcagaagggaagtagtattcagggggtaaacaggtctcccagcattctgagtgttccaaaccagtaatccacatgccaattcaaatagaacagccccttgctagatattaccacagataatgacagtacatggtagaactgcccatgccacaaatatttatttggaaaagtagtcattaaatgaacccactgccttaaatgtcttgaatgttgcagtcaagtgtctgtcatgtgttgatatccacacagaattaggccctaatgagagccttagaccctcaaccatgcccccttcgttggcatcacagggccttatttggaagagcggggcaaagaggatggaaatcataaaatatttcatgggaatcgaacctagggatagtgctccacttctgacgatggagtgaagacacttggcagacttgagccagacacttcacctagtagttcctgaaactgtgagcaccactgcactaagccagtgcggagctgttagggacgggcccagctcctgcacacggacacagaatgtctggagagggcagcaggcctctgagggttctggaatctgtgccaccttatttgaccacactccaaaattctgtttttattttaacccttgaatctgctttatgtacataatcaaaatatctatatctatatctatatctatatctatatatttttaatcatctacatgtaaatgaagcaatagaattctaacataaggccaagaaatgagacgaatgtttggggtttatgttttttaaggtaaatacgggtattgtttttaattattaccatgtattaaattgtgggctttgaaacctaatgaaacctgttagccacttctctgtgccatatacttcccatgttaccaaaatacgcccaactctttagccaaaagagaacnctgacctcctgagtttccatgctcctttctgtcaggtttaaatgtagtcttctggagaagtatttttgacattgagctctgggacaggacaccttgggtttgtggactgcagcccactatgatgttattacttctctggccaggcctccagtggaagtgcacaggcactcccaatgttgttaatgctctgtcttccatttgttctggaatcctacgtgttggtctgtggttccatgcattagctgtttgtaaataatgcatttgcatactgaaaaaggaatgccacctgccacagttgatggtgagaagctcctttgacgtggtgcaattttgatgagatgtctctggggacacgaggatgccctaatgatgctgacttgtcatggttgcagcatttgaacttttggtgttaaaaaaaaaaacctgtaagtctgtaacctggcaacattttacaaccctgtatttttaaagatggctttctaataaaaaatccagaaccacacagccctatggtcaaacaatcctacgtttgtgcctctgcttttaaaggtgctgtgctggacagttggcatgccagggttcgagaagagtgaatggcttgacgtccttgcagttaactgtgcaaaattggctggctgcctctgttcctactgtactgtaactttgatcatgtctgttcctattccattctcccaggagcttctctgcagactgacacaccctcccccaccccgggtagtggagatgctggtgtctgggtagtcatggatttctgctgacatttgaatgtgataaacaatccagcattacttaggaaatgctacatgcggaatgtgcacgtttccaggggcgagtattgtcaatcaaaaggtttgcaatgatttccttcctgccaaaaataaacatgtgaaactgc

SEQ ID NO: 2134 - DNA, 473 bp, Homo sapiens
gctttcggtggttccttggtgactgggaattgcttgtgtgcatgtgttgggtgcatgcttccgggtctcagctgccccaggcccgcacaggcaaccccttcccatccaaagccattggtggagcttctctggaatcatttgccaaaagcccaaggcagaatccaagggtccaagaccatttccatggagctcatgtttttcttttctgtaggaacttttttttaaccagcacccaccataattccgaagccacgtttcatctttcctggatcactacagtgaagtattacacgttgtacacgttcccagtctggccttggcttgctcggataaaactttgtatgtattttgtatggcatagattctatattgtaatgatgtcctatgcaaaaagagaaattaacgaaattgtaaattttattgttttaacgtgtatgcatgtttagtgacgtttacattttgaaataaaattt

SEQ ID NO: 2135 - DNA, 1065 bp, Homo sapiens
gaattaggcacgagagctccttgccagctctcctcctcgcacagccgctcgaaccgcctgctgagccccatggcccgcgccacgctctccgccgcccccagcaatccccggctcctgcgagtggcgctgctgctcctgctcctggtggccgccagccggcgcgcagcaggagcgcccctggccactgaactgcgctgccagtgcttgcagaccctgcagggaattcacctcaagaacatccaaagtgtgaaggtgaagtcccccggaccccactgcgcccaaaccgaagtcatagccacactcaagaatgggcagaaagcttgtctcaaccccgcatcgcccatggttaagaaaatcatcgaaaagatgctgaaaaatggcaaatccaactgaccagaaggaaggaggaagcttattggtggctgttcctgaaggagccctgccttacaggaacagaagaggaaagagagacacagctgcagaggccacctggattgcgcctaatgtgtttgagcatcacttaggagaagtcttctatttatttatttatttatttatttatttgtttgttttagaagattctatgttaatattttatgtgtaaaataaggttatgattgaatctacttgcacactctcccattatatttattgtttattttaggtcaaacccaagttagttcaatcctgattcatatttaatttgaagatagaaggtttgcagatattctctagtcatttgttaatatttcttcgtgatgacatatcacatgtcagccactgtgatagaggctgaggaatccaagaaaatggccagtaagatcaatgtgacggcagggaaatgtatgtgtgtctattttgtaactgtaaagatgaatgtcagttgttatttattgaaatgatttcacagtgtgtggtcaacatttctcatgttgaagctttaagaactaaaatgttctaaatatcccttggacattttatgtctttcttgtaagatactgccttgtttaatgttaattatgcagtgtttccctctgtgttagagcagagaggtttcgatattta

SEQ ID NO: 2136 - DNA, 331 bp, Homo sapiens
ggctgttatatagatatatatttaatataatatgtgtgattgtggttacagatacatatttggtgctttatttatccagaagcatgagtcacatagtacataaagtattgaatacaaaattctaaagataaacacaatttttcttgaatttaaaatatatgggataaatgcttacaaatggatttataaacctttcacttctacttcattctcctggctgtgtcttccgaagatgagttgctagttgcaacattaaaaaaaaatagctccttcaaatcctgacactatatgacataaaaagaacttttggcaaatatttattcagattgct

SEQ ID NO: 2137 - DNA, 253 bp, Homo sapiens
tttttgagtttgaaaggctctttaatagcaagcgaatggtaattacatggtcggatgaggtcctcactctcaggggagggaggagggagcagaggtggacagggtgcagtataggatttacactgtttgaagcatctaacgaagggcaacagtttttggcaacccaattcacagttttgtaatttacaagagatttctttgaaaggaaataggaaggcaaagaaagcacacataccctaccggcaacacttct

SEQ ID NO: 2138 - DNA, 218 bp, Homo sapiens
agcattttcaaactttatttacaactgtcacagtgacaaaaagtagtttggaaaaaaaaaaatgctagtttctccctgrgcctcaaaaaagaacagatagaagttamagggggttcatytcacaacaggcatttttactgaaatactaggrattyyyycaatamaatcagttagaaatacacamaaattacttgaaaaaaaaaaaaaagrgggggcca

SEQ ID NO: 2139 - DNA, 483 bp, Homo sapiens
  misc_feature: n=a,t,g or c
aaaatttttagccaacttttatttttatgcctagaaaaatacatgggacgtttaggactaatgtgctgggcaatttgctacttagtgatagtaacacaatcctgaaaaggcaagcacaattattctgtacnttttnaaaanntttaattcagcattaagaccataattttttcatatttaaggagtatgaaaaatttggtgggagttttaaaagctgaatacatgtagcgttggatcaaggcacatacaagactggccaaangggcgtacaatgcacctttgggtttttttgttgaaaaaaaaaaaaatcctgggcaaccagaaaangtggtaatggggtttttccacnaaggtaaccagctcaccaatttcnagtagggaagcccagaaaggaaattgttacattaccgagttcctttatataatatcngggaaattgtgacngtaatggggcagtattcctgatccttgtaaaagtaaatt

SEQ ID NO: 2140 - DNA, 380 bp, Homo sapiens
  misc_feature: n=a,t,g or c
anattcggaacgagggtatttttaacaggaatttaagaaaatattactggaattaaaaatatatatatattaaacaagaattttctttgctctgtctagcttaaactactactcaagctgcttaagttcttaagtattgtttgtaatcaccaataaataagtgcatttgtaattcatcagtcattattagcttttattaaaagaagattacgttttacaatgtaactataatctcttgaatttgggtatcttattaatgagttttaaagatgtaaaacctaaccttttttaaagctccattgtcttatgtttttagggggntttccgtaaacatatatcttacatattaataaactttttccaaatcttggaaaaaaaaa

SEQ ID NO: 2141 - DNA, 340 bp, Homo sapiens
gtttaaagttaaagtttatttgtattctttgtaggaatatcaataaaagacctcaaacgtatctatatctgtacatgtacaagaactgtcaaaaattattcacagaacaaaaataaatcttctttagaacaaacccaggtaatgaaatgctgatacggatctcacatacggaataatctaaatgctactagcacaaaaatatggctttaaaaataaaataaaatcttgggttttgtttttctaaggtgtatttctctttcttgaaataaaaaataaattatttagagctatcattgtaaaatagtcgtgtgttaacacactcttattaaggccctggaga

SEQ ID NO: 2142 - DNA, 284 bp, Homo sapiens; identical to SEQ ID NO: 443

SEQ ID NO: 2143 - DNA, 271 bp, Homo sapiens
tcacatgatagttttaatatttatttagcagaggggtaaattgaaacatcagttctctagaccagtcaggaaatgtatgctttgtgctttataagcttacattcaacatagatgacataagttaccatactcaaatgtaagatagggagaggtagaagaaatagctgagaacttgaaaagatgtactgttattgtcaacaaaccaatgtcttctcccttcataaaattgtgtttagggaatattaacaattaagcttgtatacaatagtaa

SEQ ID NO: 2144 - DNA, 383 bp, Homo sapiens; identical to SEQ ID NO: 466
  misc_feature: n=a,t,g or c

SEQ ID NO: 2145 - DNA, 206 bp, Homo sapiens
tcttctgtaatatgtgtcaaagatattatgaaaaaaagattagaagtcctttcccccatttttagtaatcttgatattatgaaacaagtgagtactaaaacaaaaacaacaataaatatgagcactacagcaaacatgacatactgtaatagaattttattgaaaaaaataacacgtacttactgaagtttttttttttttttttt

SEQ ID NO: 2146 - DNA, 3344 bp, Homo sapiens
gaattccgaagacgcaaaagcagaaacccctgataaaaccatcagacttcatgagacttattcaccaccatgagaacagtatgggggaaaccaccccagtgattcaattttctcccaccagttgcctcccacaacatgtggcaattatgggagttcaattaaagatgagatttggatggggacacagagccaaaccatatcaagtacaaagaaaagagtctcataagatgcaagtgaggaagagttttgtcaaagcaacaggcttcacaagtcctggttaggaagcgtcgtgcaaattctttacttgaagaaaccaaacagggtaatcttgaaagagaatgcatcgaagaactgtgcaataaagaagaagccagggaggtctttgaaaatgacccggaaacggattatttttatccaaaatacttagtttgtcttcgctcttttcaaactgggttattcactgctgcacgtcagtcaactaatgcttatcctgacctaagaagctgtgtcaatgccattccagaccagtgtagtcctctgccatgcaatgaagatggatatatgagctgcaaagatggaaaagcttcttttacttgcacttgtaaaccaggttggcaaggagaaaagtgtgaatttgacataaatgaatgcaaagatccctcaaatataaatggaggttgcagtcaaatttgtgataatacacctggaagttaccactgttcctgtaaaaatggttttgttatgctttcaaataagaaagattgtaaagatgtggatgaatgctctttgaagccaagcatttgtggcacagctgtgtgcaagaacatcctaggagattttgaatgtgaatgccccgaaggctacagatataatctcaaatcaaagtcttgtgaagatatagatgaatgctctgagaacatgtgtgctcagctttgtgtcaattaccctggaggtcacacttgctattgtgatgggaagaaaggattcaaacttgcccaagatcagaagagttgtgaggttgtttcagtgtgccttcccttgaaccttgacacaaagtatgaattactttacttggcggagcagtttgcaggggttgttttatatttaaaatttcgtttgccagaaatcagcagattttcagcagaatttgatttccggacatatgattcagaaggcgtgatactgtacgcagaatctatctatcactcagcgtggctcctgattgcacttcgtggtggaaagattgaagttcagcttaagaatgaacatacatccaaaatcacaactggaggtgatgttattaataatggtctatggaatatggtgtctgtggaagaattagaacatagtattagcattaaaatagctaaagaagctgtgatggatataaataaacctggacccctttttaagccggaaaatggattgctggaaaccaaagtatactttgcaggattccctcggaaagtggaaagtgaactcattaaaccgattaaccctcgtctagatggatgtatacgaagctggaatttgatgaagcaaggagcttctggaataaaggaaattattcaagaaaaacaaaataagcattgcctggttactgtggagaagggctcctactatcctggttctggaattgctcaatttcacatagattataataatgtatccagtgctgagggttggcatgtaaatgtgaccttgaatattcgtccatccacgggcactggtgttatgcttgccttggtttctggtaacaacacagtgccctttgctgtgtccttggtggactccacctctgaaaaatcacaggatattctgttatctgttgaaaatactgtaatatatcggatacaggccctaagtctatgttccgatcaacaatctcatctggaatttagagtcaacagaaacaatctggagttgtcgacaccacttaaaatagaaaccatctcccatgaagaccttcaaagacaacttgccgtcttggacaaagcaatgaaagcaaaagtggccacatacctgggtggccttccagatgttccattcagtgccacaccagtgaatgccttttataatggctgcatggaagtgaatattaatggtgtacagttggatctggatgaagccatttctaaacataatgatattagagctcactcatgtccatcagtttggaaaaagacaaagaattcttaaggcatcttttctctgcttataataccttttccttgtgtgtaattatacttatgtttcaataacagctgaagggttttatttacaatgtgcagtctttgattattttgtggtcctttcctgggatttttaaaaggtcctttgtcaaggaaaaaattctgttgtgatataaatcacagtaaagaaattcttacttctcttgctattaagaatagtgaaaaataacaattttaaatttgaatttttttcctacaaatgacagtttcaatttttgtttgtaaaactaaatttttaattttatcatcatgaactagtgtctaaatacctatgtttttttcagaaagcaaggaagtaaactcaaacaaaagtgcgtgtaattaaatactattaatcataggcagatactattttgttatgtttttgtttttttcctgatgaaggcagaagagatggtggtctattaaatatgaattgaatggagggtcctaatgccttatttcaaaacaattcctcagggggaccagctttggcttcatctttctcttgtgtggcttcacatttaaaccagtatctttattgaattagaaaacaagtgggacatattttcctgagagcagcacaggaatcttcttcttggcagctgcagtctgtcaggatgagatatcagattaggttggataggtggggaaatctgaagtgggtacattttttaaattttgctgtgtgggtcacacaaggtctacattacaaaagacagaattcagggatggaaaggagaatgaacaaatgtgggagttcatagttttccttgaatccaacttttaattaccagagtaagttgccaaaatgtgattgttgaagtacaaaaggaactatgaaaaccagaacaaattttaacaaaaggacaaccacagagggatatagtgaatatcgtatcattgtaatcaaagaagtaaggaggtaagattgccacgtgcctgctggtactgtgatgcatttcaagtggcagttttatcacgtttgaatctaccattcatagccagatgtgtatcagatgtttcactgacagtttttaacaataaattcttttcactgtattttatatcacttataataaatcggtgtataattttaaaaaaaaggaattc

SEQ ID NO: 2147 - DNA, 365 bp, Homo sapiens
  misc_feature: n=a,t,g or c
cttttttanttttttctttttttctttttttatttttattttttcctgtaaaacagcaaacacctccatgagaagtcttggaaacttggaagtgacttcatctctcttcaatgtactgcatccataatttatcgccatgtgcaacagctttgcgttttctaaggcacaatttttaatgaaatgatgtgtagatttcaatctaataacagctcatccaaatgacaaatatggtcgaaatccctccagtggctgaggaaatttctgcacctatatggaacccacatgcaaagaacccatctagcatgtaataaataatccgctagccatactcaataagacacggaaaaattattgcttacataaca

SEQ ID NO: 2148 - DNA, 4087 bp, Homo sapiens
gaattcatgccgttgggtggagtcagcgcccccaggctctacttggaaaacctttaagctcttttctttcgtaagctctctgggcgagggtggtggtatgttttgtgaggtttagcttagccccaaatcctcaagccccgccgccgccgctagtgcggtgcaggaaccgggccagtactgcgcccagggacagagcgctggggaggaacaaaggcggcgctaggctgtgttatccgagagatctttcgggggccgcgggcagcccgtcctgccgcgaccgagggtctgggcgtcccggctgggccccgtgtctgtgcgcacggtttcgctgatgctgaggggccactttctgtctcgcgttgttctctggggaccgggagaggaggaggcacccaaaaagagcgggggcgttgggcgagctcgggggacgtgggagggggaacgggaacaaagcgcagcctagggttagcgtgggaagaccctccgcggtctttggcgttttggaaagatacccacacattcccgggaaaacatggtgagtttctgcccggagcccccggagcgggtgtcagggcggcgaggggcggggttgtttgtttctggcttctatggcgttggagccactgggcgcggttcgcctcactgaacctcttctgtcaggagctgactgaaaaaaaaacaaaaaaacctttcatcattgcggaactgtaggctccaaaagggttttcttcactattataagttagatgacttttttttttcttgagcaaaatcataattcacttcacaagctctttaatgtctggtctggggacgccctgccctgaccgactgaagtgtgtgtgtgtgtgtgtgtgtgtgtgtgtgtgtgtctgtgggacgcctgccctgaccgactgaagtgtgtgtgtgtgtgtgtgtgtgtctgtctgtctcgtctggactgcacagttcagcgagggagaaaggcccactttgtgagggtaccgatggtcaggacccagggaaacgcccttccccgccgcccccccgccccgcccccaccacattcagcgaatagacaattgaaagtggtagccctaaagaccacagagaagaaaacctctattggatgcaaagaatatgaatattatgtgatgggtagagaatctcaggatgaaaatactattttgttgttttaaataaatatttcattatccttccactgggcttttattctttggtaccttttcatgtgatgcttgtttctaacttaggaacttttgtgtgtgtgtgtgtaagatacggataatttttcagcttttacagtggagaagatctggaaaaaggtttttttttaaaaaaaaaagtaatgaaattgctacagacaaagaagaattatactccgcttcccgttgtcccccgttccagtgcatcttaattaattcatttcaattcaggcacatggtcccgggcggtcagaggaggaaaactggcaaaacagcacaatgagatcatgtaggcagctgctggaaatagagcttgctctgttaaataatgtagcagacagtacaggctagcaccaggcacacagcaaatacagcaatgcagcaatgcagaaggcagaccttgtctaaactcctagtattgatggattctgcagtacagatgtccggattataatatcaagtcctattcagaggaaactttcatctttatttaaaagggaagaaagcagtaaaattaatcccaattaagtcataattggatttacttcattttacaaatttgtgctttgaatactgaatagcttttaaatatgaaaatcttctattcaagactggtagtaggccaatggctggatacccgtgctgacagggccaaggcgacaatcattattcagaccacacccatatgcagcatttgtagcaggtgattttccttaaatctttgtatcgtgctggggatatgacctcaaataatttagaaaaatatctgtatattattagaaatattttgaaatttcctataatttaaatgctaatacaccttaattttacatttttcacttttcctccccacagcgtgagtgcatctccatccacgttggccaggctggtgtccagattggcaatgcctgctgggagctctactgcctggaacacggcatccagcccgatggccagatgccaagtgacaagaccattgggggaggagatgattccttcaacaccttcttcagtgagacgggggctggcaagcatgtgccccgggcagtgtttgtagacttggaacccacagtcattggtgagttgacctcagtaacccaagtgagatcccagggtgctggacaggaggtctgtcctggggggctccgctggtcactcacccactctcctcccgctcctcgtcccctcctcctcctccccctgctcctcccccatcatgtctccagatgaagttcgcactggcacctaccgccagctcttccaccctgagcaactcatcacaggcaaagaagatgctgccaataactatgcccgagggcactacaccattggcaaggagatcattgacctcgtgttggaccgaattcgcaagctggtatgtttcttttcaagaataaagtaaattaatgagcctaaagaacacttttgaaataatgctttttttttcaaacacagaattgaactgttattttaataaagagtggaatgagtcattctttggggtttttaaaattcagttaaaatgaactatttgatgtcattttgtaaatgttaatgagaattttttaaaagcatttgtcaaataagatctaagtcctggagatgtatgaaagtgaaatatattactatgatgtactacaagataaactaacctttcctctgtcctctcttttgtataggccgaccagtgcacgcgtctccagggcttcttggttttccacagctttggtgggggaactggttctgggttcacctcgctgctcatggaacgtctctcagttgattatggcaagaagtccaagctggagttctctatttacccggcgccccaggtttccacagctgtagttgagccctacaactccatcctcaccacccacaccaccctggagcactctgattgtgccttcatggtagacaatgaggccatctatgacatctgtcgtagaaacctcgatattgagcgtccaacctatactaacctgaataggttaataggtcaaattgtgtcctccatcactgcttccctgagatttgatggagccctgaatgttgacctgacagaattccagaccaacctggtgccctatccccgcatccacttccctctggccacatatgcccctgtcatctctgctgagaaagcctaccatgaacagctttctgtagcagagatcaccaatgcttgctttgagccagccaaccagatggtgaaatgtgaccctggccatggtaaatacatggcttgctgcctgttgtaccgtggtgacgtggttcccaaagatgtcaatgctgccattgccaccatcaagaccaagcgtaccatccagtttgtggattggtgccccactggcttcaaggttggcatcaactaccagcctcccactgtggtgcctggtggagacctggccaaggtacagagagctgtgtgcatgctgagcaacaccacagccattgctgaggcctgggctcgcctggaccacaagtttgacctgatgtatgccaaacgtgcctttgttcactggtacgttggggaggggatggaggaaggtgagttttcagaggcccgtgaggacatggctgcccttgagaaggattatgaggaggttggtgtgcattctgttgaaggagagggtgaggaagaaggagaggaatactaaagttaaaacgtcacaaaggtgctgcttttacagggaagcttattctgttttaaacattgaaaatgttgtggtctgatcagttaatttgtatgtagcagtgtatgctctcatatcaattactgacctatgctctaaaacatgaatgcctttgttacagacccaagctgtccatttctgtgatgggttttgaataaagtattccctgtcttaaatgaattc

SEQ ID NO: 2149 - DNA, 411 bp, Homo sapiens; identical to SEQ ID NO: 313
  misc_feature: n=a,t,g or c

SEQ ID NO: 2150 - DNA, 425 bp, Homo sapiens; identical to SEQ ID NO: 460

SEQ ID NO: 2151 - DNA, 300 bp, Homo sapiens
gctttttaaaactgttttattaacttcacaatatataatgagcatctttccatgcaataggtaaaactctcctgctgacagaaacttacaaactgggtcaaaaacaacattcatttagaagctggtaataggagacccacaagaaataggtaacatcaaaacgtttacgacaaaggtacaccacaaatgtgtaagtttaggaagcaggggtctccctattaacttcagggaaaccatcaggattcagggcataaggcaaaactcatcgtgatggtcatggtgggggggatcagtgctgac

SEQ ID NO: 2152 - DNA, 430 bp, Homo sapiens
gaacaaacagcatgcactgtggtatcctttatttaaaaattgtgagctgactacagttgtagtgttctcatttaccattctgatggcataataaaccaagagaacattaacacaattccaagaaggcattaacctgtaacacacatatacgccacacatgcacacacacaacatacacgcacacaaaggttatattctgaacacaaaagtgatagaaaaaagctttgaatgcgctaaatcaaataaaaaccctttattataataaactgtggcaatactgtggctatcatgaaaaatattgtaactattttaaaagcaaaaggaaaaatactggcagtttgaaactagcagcaaaaagcagataaaaatagaatggaagataacataagactaatatcaaaattctaatgttgatactgtgtaggattgc

SEQ ID NO: 2153 - DNA, 4000 bp, Homo sapiens
gcacgatctgttcctcctgggaagatgcagaggctcatgatgctcctcgccacatcgggcgcctgcctgggcctgctggcagtggcagcagtggcagcagcaggtgctaaccctgcccaacgggacacccacagcctgctgcccacccaccggcgccaaaagagagattggatttggaaccagatgcacattgatgaagagaaaaacacctcacttccccatcatgtaggcaagatcaagtcaagcgtgagtcgcaagaatgccaagtacctgctcaaaggagaatatgtgggcaaggtcttccgggtcgatgcagagacaggagacgtgttcgccattgagaggctggaccgggagaatatctcagagtaccacctcactgctgtcattgtggacaaggacactggtgaaaacctggagactccttccagcttcaccatcaaagttcatgacgtgaacgacaactggcctgtgttcacgcatcggttgttcaatgcgtccgtgcctgagtcgtcggctgtggggacctcagtcatctctgtgacagcagtggatgcagacgaccccactgtgggagaccacgcctctgtcatgtaccaaatcctgaaggggaaagagtattttgccatcgataattctggacgtattatcacaataacgaaaagcttggaccgagagaagcaggccaggtatgagatcgtggtggaagcgcgagatgcccagggcctccggggggactcgggcacggccaccgtgctggtcactctgcaagacatcaatgacaacttccccttcttcacccagaccaagtacacatttgtcgtgcctgaagacacccgtgtgggcacctctgtgggctctctgtttgttgaggacccagatgagccccagaaccggatgaccaagtacagcatcttgcggggcgactaccaggacgctttcaccattgagacaaaccccgcccacaacgagggcatcatcaagcccatgaagcctctggattatgaatacatccagcaatacagcttcatcgtcgaggccacagaccccaccatcgacctccgatacatgagccctcccgcgggaaacagagcccaggtcattatcaacatcacagatgtggacgagccccccattttccagcagcctttctaccacttccagctgaaggaaaaccagaagaagcctctgattggcacagtgctggccatggaccctgatgcggctaggcatagcattggatactccatccgcaggaccagtgacaagggccagttcttccgagtcacaaaaaagggggacatttacaatgagaaagaactggacagagaagtctacccctggtataacctgactgtggaggccaaagaactggattccactggaacccccacaggaaaagaatccattgtgcaagtccacattgaagttttggatgagaatgacaatgccccggagtttgccaagccctaccagcccaaagtgtgtgagaacgctgtccatggccagctggtcctgcagatctccgcaatagacaaggacataacaccacgaaacgtgaagttcaaattcaccttgaatactgagaacaactttaccctcacggataatcacgataacacggccaacatcacagtcaagtatgggcagtttgaccgggagcataccaaggtccacttcctacccgtggtcatctcagacaatgggatgccaagtcgcacgggcaccagcacgctgaccgtggccgtgtgcaagtgcaacgagcagggcgagttcaccttctgcgaggatatggccgcccaggtgggcgtgagcatccaggcagtggtagccatcttactctgcatcctcaccatcacagtgatcaccctgctcatcttcctgcggcggcggctccggaagcaggcccgcgcgcacggcaagagcgtgccggagatccacgagcagctggtcacctacgacgaggagggcggcggcgagatggacaccaccagctacgatgtgtcggtgctcaactcggtgcgccgcggcggggccaagcccccgcggcccgcgctggacgcccggccttccctctatgcgcaggtgcagaagccaccgaggcacgcgcctggggcacacggagggcccggggagatggcagccatgatcgaggtgaagaaggacgaggcggaccacgacggcgacggccccccctacgacacgctgcacatctacggctacgagggctccgagtccatagccgagtccctcagctccctgggcaccgactcatccgactctgacgtggattacgacttccttaacgactggggacccaggtttaagatgctggctgagctgtacggctcggacccccgggaggagctgctgtattaggcggccgaggtcactctgggcctggggacccaaaccccctgcagcccaggccagtcagactccaggcaccacagcctccaaaaatggcagtgactccccagcccagcaccccttcctcgtgggtcccagagacctcatcagccttgggatagcaaactccaggttcctgaaatatccaggaatatatgtcagtgatgactattctcaaatgctggcaaatccaggctggtgttctgtctgggctcagacatccacataaccctgtcacccacagaccgccgtctaactcaaagacttcctctggctccccaaggctgcaaagcaaaacagactgtgtttaactgctgcagggtctttttctagggtccctgaacgccctggtaaggctggtgaggtcctggtgcctatctgcctggaggcaaaggcctggacagcttgacttgtggggcaggattctctgcagcccattcccaagggagactgaccatcatgccctctctcgggagccctagccctgctccaactccatactccactccaagtgccccaccactccccaacccctctccaggcctgtcaagagggaggaaggggccccatggcagctcctgaccttgggtcctgaagtgacctcactggcctgccatgccagtaactgtgctgtactgagcactgaaccacattcagggaaatgcttattaaaccttgaagcaactgtgaattcattctggaggggcagtggagatcaggagtgacagatcacagggtgagggccacctccacacccaccccctctggagaaggcctggaagagctgagaccttgctttgagactcctcagcacccctccagttttgcctgagaaggggcagatgttcccggagatcagaagacgtctccccttctctgcctcacctggtcgccaatccatgctctctttcttttctctgtctactccttatcccttggtttagaggaacccaagatgtggcctttagcaaaactgacaatgtccaaacccactcatgactgcatgacggagccgagcatgtgtctttacacctcgctgttgtcacatctcagggaactgaccctcaggcacaccttgcagaaggaaggccctgccctgcccaacctctgtggtcacccatgcatcattccactggaacgtttcactgcaaacacaccttggagaagtggcatcagtcaacagagaggggcagggaaggagacaccaagctcacccttcgtcatggaccgaggttcccactctggcaaagcccctcacactgcaagggattgtagataacactgacttgtttgttttaaccaataactagcttcttataatgatttttttactaatgatacttacaagtttctagctctcacagacatatagaataagggtttttgcataataagcaggttgttatttaggttaacaatattaattcaggttttttagttggaaaaacaattcctgtaaccttctattttctataattgtagtaattgctctacagataatgtctatatattggccaaactggtgcatgacaagtactgtatttttttatacctaaataaagaaaaatctttagcctgggcaacaaaaaaa

SEQ ID NO: 2154 - DNA, 616 bp, Homo sapiens
  misc_feature: n=a,t,g or c
cagagcaaatgttttattaacagatttttctccagtagtcttgaaaatctcccctgggggagaaaactggcaaaagggggcctgagggttgttggaagaaatgaaaagtacataggatgctattttgaaaaactgatttgtcagaagccactttattttaacaataatgtgactgcacctggcacatgagacaggctctgggcctgtttctcaatgttgtgaaaagcaggacagtcagttcccatggagtagattacagcgtgttggacaaggacattcccccgcgtgaaggcacactccatggagccagtggggccaccattcacggtgtgcaagctgtggccttggagagaacatgggcagggcttccccagcctctactataccccagctttactccattgatcacaacaatgggcacttttttctttggtgcaaatatttccattttccaattgagcctagactttgattttataaaaggaaaagagaatatctatatatgtaaatatctgcatgtgagtgtatgtgtatatatatatatataagtatatacgctttatagataaaatattatggttgcagagcntccaattttgtaaaanaccgtttacta

SEQ ID NO: 2155 - DNA, 228 bp, Homo sapiens
  misc_feature: n=a,t,g or c
aaaataaacagacatttatttccagacttatcttttacataagttaaatacacatttgtctgaggcactgaaacattcacatacacaacccaaattcccaggntttgtcagcagancaatgttaataacaaatcaagtttttttttaaaaaaaacagtgaacagtgttttatacaagcatattgactatttctttcttaaccttaaacattctaaacgtaaaattgta

SEQ ID NO: 2156 - DNA, 245 bp, Homo sapiens
ctttattaaaaccttagcatgtctccctgatctgaactatttgctttctcttcaagataagttgtattttaccatggaaaaatacagtatctaacattaccattcacgttaaatgaagtttcctcataacatttatctttagttttatgaagtcatcgtgaccaatgttacagtaatttctgttagctgattgtggtaaacaatgtttaatgtgaaaagaaattaaaactttcttcatctgttgt

SEQ ID NO: 2157 - DNA, 449 bp, Homo sapiens
  misc_feature: n=a,t,g or c
aattaccaagacatttattagttgtcaaaaagctttacaatcagtttcatgatcagaaaatagagcaaaatttcaatattgttttctttataaaattgatgaatttctgaaaagataaaggatcatttgatttttaaaaatgtcagcttcatcacatgatgttccagagatctgaccccaaaagcttctcaagttttactatccatagtgtccttatttgtaactgagacccatccgttattttccatctgangcttcttcaggcagtttataacaaagtgaaagaagttgggactaagagagccatcatgggatcttgtcttcggtaatacacttggtcaacctttaggaaatactttattctgncaaggaaggtcttaggttactgtcngggagcngggtnggctagggggattaggntgtttatttccngggggangcctaaggct

SEQ ID NO: 2158 - DNA, 417 bp, Homo sapiens
  misc_feature: n=a,t,g or c
gatattctaagacaaaaaaatggttaatcttcagattaataaattaggtcattataataataaattaattttttttaaagttcagcaacctctgtccaagtatttacaacaatacttgaaagttcctttacaaaacagaacacattttcttttcacgttaagcatactgggtatctgtgtctttcacaacaagcatttttaaaagaaaactcaatgcacaaatgggttaattagtataaaagtgctaagggctgtttgaaaagttaccactatagtatacagtcagttatatttgaggcatactacaacaaacttccagcttattgtggacaatattccagtagttgtttcaaaccattgtttgaaaaaaaaaaaaaaaaatccnggagctgattagtgatgcagataagaactgcc

SEQ ID NO: 2159 - DNA, 349 bp, Homo sapiens
  misc_feature: n=a,t,g or c
gaccatgcaannttctnaatgtatattggtctgggaacttaaagatggaaacagagaatacatagggagctatgcaacacaccaagggccagtatccacaataataataacagtgacaacagcantantaatatacaatgctataagattattaaaatctattctataatgcacagagaagtacctgcttgaagccattaaatatatgacagggtctgtcttcagtgcaacatatcaantttgggcanttgaaggggtntatcaaatatatatttttnggctttcaaaatgtgggggccaaactaaantttagggcttttcnggataaaccnttaaaanttttaatcgg

SEQ ID NO: 2160 - DNA, 482 bp, Homo sapiens; identical to SEQ ID NO: 310

SEQ ID NO: 2161 - DNA, 439 bp, Homo sapiens
  misc_feature: n=a,t,g or c
tgacatttnnataaaaatttattgaaatttcagtgatgttttaaagagagggggaaaaatacagaaaaccaaagaacccatcaacaactataacacaaaatataccttcatgaatttgtctttaaaccatctctcagcacctgacttttgaactgtgaatatatctctataggcaggcaccaattcaaaacaccgatactgacaacagtagtaaattccacttcgttttgaggaaatcagagactagcaaatacaaataacaaaagnaaanttaaaaagtcaaaccgcagcctctgccctcccccctccccacagcaatctcaggttatattttaagggnatttggaagtgggngctgggnaagtgggcactccttccccccaattttgggnggaaaatagggggaataggcacttttccccccnctttttgggggcca

SEQ ID NO: 2162 - DNA, 698 bp, Homo sapiens
  misc_feature: n=a,t,g or c
gctcttgaacccagaaggcgaaggttgcagtgagccgagatcatgccattgtactctagcctgggtgacgggagcaagactccgtctcaaaaaaaaaaaaaaaaaaaaaaagaagtagagacagggagacggggtctcactgtgttgcctaggccggtcttgaactcctgggctcaagtgattctcccaccttgacctcctaaattgttgggattacaggtgtgagacagtgcacctggccgaaatagctcaagtttctgaaaaacaaatctgaatctatttgttattcttagcgtcactggtctggctttcagaattaacatacaaggttgccacacctagttctggcccagctttatggtcttttattccagtattccaccaaagtttgtttttcctgcattccagttctcaagtcttaaggataaagatngtacttgacagtttagtatatccataaaactatttgaaggtggttaaggttccttgggttcaattttccttaaaactttgcctgaatatnggaagattgtagggcaatgaaaaggtctactaaattaggaaaaccttgaaataaattagggatccnaggtaagagcccctaaacatcaagcaatctgggagtctgtaagaaatnaatattttttggataatcctaacnaatccacccngttggaagnggatccttgtccttgcaa

SEQ ID NO: 2163 - DNA, 421 bp, Homo sapiens
  misc_feature: n=a,t,g or c
gtaggtcagagacagctggatcagctccagccacatttattacaaaatagtgaccgcagttctggtatagaaaagatccctgacagcccagtacacctgcaacggcccccaccccacagagttcctctctcaggtgcctcaggtgtggaagttctcagattcgaaggtttcctgccaggagggcgctgtaccgggcagttgtgaggggcaggtaggcacctacagcctggtccagaacgtacagtgggtcagacagggtgctggggtcgaagccctcatttgccatccgaactttctgctgtttgaaggtctctgtggtggccaaagactcctggagcctgaggaatcggggccgggcataaggtggcaagttctcagacangtnggtgtagagctgcataaggtccaaagcgttgggggg

SEQ ID NO: 2164 - DNA, 257 bp, Homo sapiens
  misc_feature: n=a,t,g or c
antttcggcacngaacccctgcggtgcacgnctccctggacaagttcctggcttctgtgagcaccgtgctgacctccctacccctccttctaactttattgctgtattctcttcactctatatttctctctatttgctaatattgcattgctgttacaataaaaattcaataaagatttagtggttaagtgcaaaaaaaaaaaaaaaaaaaaaaaaaaaaaaaaaaaaaaaaaaaaaaaaaaanaaaanaaaaaaaa

SEQ ID NO: 2165 - DNA, 592 bp, Homo sapiens
  misc_feature: n=a,t,g or c
ttttttttttcataaatatttatattttttaatgaaatacacaccaaaaaaaagcacacatgcagataattcacaaacaatcaaatccttgggaaaggctctgcatttgttcaacaaggtcaagtgtcattaggagcacagaacaaccgaatgtaaaatttctttccaggagctttccacgtggttggaataaacacaatttagaccatgcaaaactcttaatgtatattggtctgggaacttaaagatggaaacagagaatacatagggagctatgcaacacaccaagggccagtatccacaataataataacagtgacaacagcaataataatatacaatgctataagattattaaaatctattctataatgcacagagaagtacctgcttgaagccattaaatatatgacagggtctgtctcagtgcaacatatcaaatttggcaattgaagggtatatccaatatatattttttgcttcaaaatgtggaacaaactaaaatataaggctttctgataaactataaaaatttaatcagcattggatctaatgactatcttataatactcctctgcagtacttcnctagt

SEQ ID NO: 2166 - DNA, 143 bp, Homo sapiens
gcaggctagaaaataattttaatgcaaagtagaaagtatcaatccacctcatcactttccttgctctctctctgtcacctcctctttcctgtggctctgaggaggtgggagaagcaggcagtatttccacagcagctgtccat

SEQ ID NO: 2167 - DNA, 447 bp, Homo sapiens
tttttttttataaagaaattttattgcataattcttgtatacaataaacataggaaaagggtttttaatgaaaattcatgtcatttttcaaaagtgttgaactgtctggagaaaaattattacaaagctatctaaggcaaaaataatatttaaccatctaaacaaaagataatcccctttaccatttgttttgtatttaaagcaagacattttaaacacaagtaatacggagaagttttcaaattgctacgtcatttgcattaagaatttaaatgcatctaagaagtgaagagtttaaacacatgggaatgttctctagtaacagatattgctgctttcttcagatccattctgcttgaatgtaaggctatactttttgcacaccaacagaattctggcatcttctaatggtacagtaagagctggagtgcagagagggaaagtccc

SEQ ID NO: 2168 - DNA, 400 bp, Homo sapiens
ttttttttttttttttttttttttttttttttttttttttttgggaagaagccttggtttaattcgctctgtggggacactgttccgttcagaggcccctcccagccatggggtgggggacagtggtgggcgtgggaatcccagcgagcatcctggagggtgcgtcgtctccatgtattttgctcttccccatcttttccatggggtcccctgccagggtcaagcactaatatgtggtgaaggcagcaaacagcgtcggcgtccctttaggggtggggaaagggctgtagcaccaagaaccccctcccccgcccacgacatccctgaaaaggagactaaaataaagccccggggcctttctacgtaggggctccacttaaatatggaatggtggtaggca

SEQ ID NO: 2169 - DNA, 370 bp, Homo sapiens
  misc_feature: n=a,t,g or c
aagagtttaacacaatttattttatgcttaaataatcgactaggtcatccagtgtatggtttttcatacatatgtcattagagctatgngtcaatgaatgctgattttatgngaatataatcaacaaattaaagantttcaccaaaacccaaataaaaatgccctttaaaacacagcagccttattaacctaatatgacactgctagaatggttacaaatgattggcttactgaaaggggtctacatcttntagccagtacacaatacagtaataattttncagngggctgccattctactagctaagggtttctgntcagnccnttttaaatacccccgactggggccntttatgngcaccatncacct

SEQ ID NO: 2170 - DNA, 270 bp, Homo sapiens
gcagaatatatggctgtagatccatttttaatggttcatttcctttatggtcatataactgcacagctgaagatgaaaggggaaaataaatgaaaattttacttttcgatgccaatgatacattgcactaaactgatggaagaagttatccaaagtactgtataacatcttgtttattatttaatgttttctaaaataaaaaatgttagtggttttccaaatggcctaataaaaacaattwtttgtaaataaaacactgttagtaattcc

SEQ ID NO: 2171 - DNA, 267 bp, Homo sapiens; identical to SEQ ID NO: 393

SEQ ID NO: 2172 - DNA, 457 bp, Homo sapiens
  misc_feature: n=a,t,g or c
gactttaaatgataaacttttattctgaatatactgtttttgcacaagatttaacacaacattttctgggattataaatatttbataacagtattatacaavtbbbyacaaaatgtttttatcaggctaggtaattttcacaaaagtgtcaagrgaacaaaataaaggggagaaaagatctattgttcacaaaagtcgagttttttttttttttttttttttttttattcaaattttattggaagtttacaaatgtattacagacatcagtaaaacatcatatccattttacagggcacggntctcaagcaaagtgttcagaacagtctctggcagrscccacaccaaaggcctgttgcagaccttcttaacaaatagcttgacactcaacacagaacacaggctytggcctgcctcaccttcccaggccctttggggttttgtttatgcacttgaa

SEQ ID NO: 2173 - DNA, 431 bp, Homo sapiens
ctaaccaaagatatatctttggaagaaaatattaatgtataccaagcacaccttatttgtatcaattgagatgttgattaccaattaagtggttttaaacccttatttaatttgaagaagagcagcaatatacattacaatatttgggtacactttatttttatatgggttaacattctgctatatttcatttcattcgttttgagaaactgaaaacaaagggaaatcaagggtaatcggtaggtgatttgagggaaatttccaaccaatatgtgagtcttgcagtatttcattatacagccctttcttcccattatttatttttttgcaaataagtcattttgacccaaatccagcataaatagcttttcaccaattcctaacttaagacaactaaaatttacaatcatgtggcagtataaattttaaaa

SEQ ID NO: 2174 - DNA, 523 bp, Homo sapiens; identical to SEQ ID NO: 340
  misc_feature: n=a,t,g or c

SEQ ID NO: 2175 - DNA, 421 bp, Homo sapiens
caaaagggtgtttactatttggccaaacaatattttttaattgtcagtcataaagtgaaatacatactaaaatatatattaaatattcaccaaatctgcattgctgctacatgaaaacattttttggtctgttggaaaatgtaattcctgagatcattgttgggctttgtcaatcattttcctcaccatcaaatcaccttaagtgacttgggagtgtgaatctaggatgttcaattttagaccaattttctctatcttctaaatgagtaaacaggctctgtcttttataaaaggtagaaaaataaccatggtgtgctaatttttttcaaggtataccatatggaaaagtataggctgaacacaaaggaagtcttttctgaatggctctcaatcacacataaggaacatatgttttccagtt

SEQ ID NO: 2176 - DNA, 247 bp, Homo sapiens
  misc_feature: n=a,t,g or c
catgccttgaggaaagctatttatttccaagatatagactgtacttttaagacaggacttttcagaagcaggaaattttagttgttgccagagaggtgtgtcaaggacacagtgaaaggagccatgcggacatggggtggaaggctttntccaacactgttacaacacttttgtaaatgagcaaaacatctttaaaaatccttataaattctttataatatgttacacatttagagacaatatttac

SEQ ID NO: 2177 - DNA, 622 bp, Homo sapiens
ggcacgagctcgtgccggccttcagttgtttcgggacgcgccgagcttcgccgctcttccagcggctccgctgccagagctagcccgagcccggttctggggcgaaaatgcctgcccttcacatcgaagatttgccagagaaggaaaaactgaaaatggaagttgagcagcttcgcaaagaagtgaagttgcagagacaacaagtgtctaaatgttctgaagaaataaagaactatattgaagaacgttctggagaggatcctctagtaaagggaattccagaagacaagaacccctttaaagaaaaaggcagctgtgttatttcataaataacttgggagaaactgcatcctaagtggaagaactagtttgttttagttttcccagataaaaccaacatgctttttaaggaaggaagaatgaaattaaaaggagactttcttaagcaccatatagatagggttatgtataaaagcatatgtgctactcatctttgctcactatgcagtcttttttaagagagcagagagtatcagatgtacaattatggaaataagaacattacttgagcatgacacttctttcagtatattgcttgatgcttcaaataaagttttgtctt

SEQ ID NO: 2178 - DNA, 5421 bp, Homo sapiens
ccgggatccggttttttttgtttttaaaagtgtaatttcctttttatttgcatctgtttatgactgaaaaaaatgactagttattatgaagacactactgttgaagatggatattttaacatggagtttcaacaaaattacttcttgagacagagctgatgtgttttttaaataacgtgattttaagcatatatttgaacaaaactaaaacatttagtattatgaatatgaaaaaagatcagtaaatcaatgtactcttctaggctgaattaaggtagactatttaaggtttcaaaaaagtttggctggggcagaataagttttacaaaacccatgccatccaaaattaagatgacatgtagcagcaagaagtattccaatgtctcataaccagttctcgcaagcaatgtgtattccttactttaaggaagtgtcaaacaaatagaaaaatctggaagaatttactaagtgtaataaattagaggtaaatcgtaataaaagaatttatgtctcacaaaaatattcacaagtgggagttttcttttaccaacttctcagagtccttctagccccctcttcacttctgaaagatgggatttaccaaaatctggtttacatttaacttttcagggacacatgacctgaaaagaaagatgtcagataatactgacattgcctcatgcactttctttgtatcagtccttcttctgtaagtaatcagaattgggtccaaatggcatagaatcaaacattatgtatcatgccaaataccacttcctgcccaacaaaatttcatctttctccagtaatgaagaggtggacattcttgttggactgtagcatctgtgccgcccgctccacaccaaccacggcagctaacctctgggcatcatatttggagtagagaacagtgcaggtccacgtggcctcttctcctctgttggtggctctcagcatattacagatttcactgtaaaagtgtggatatgtcggcagttcatagaaaatcaggttcctgatgccttttattgctgtagtttatttccacccccttccctcctgttttctctctctccttctctctctctctctctctctcttttttttccgccctagctggggctgtgttggaggagaggaagaaagagagacagaggattgcattcatccgttacgttcttgaaatttcctaatagcaagaccagcgaagcggttgcacccttttcaatcttgcaaaggaaaaaaacaaaacaaaacaaaaaaaacccaagtccccttcccggcagtttttgccttaaagctgccctcttgaaattaattttttcccaggagagagatgtcttatcaggggaagaaaaatattccacgcatcacgagcgatcgtcttctgatcaaaggaggtaaaattgttaatgatgaccagtcgttctatgcagacatatacatggaagatgggttgatcaagcaaataggagaaaatctgattgtgccaggaggagtgaagaccatcgaggcccactcccggatggtgatccccggaggaattgacgtccacactcgtttccagatgcctgatcagggaatgacgtctgctgatgatttcttccaaggaaccaaggcggccctggctgggggaaccactatgatcattgaccacgttgttcctgagcctgggacaagcctgctcgctgcctttgaccagtggagggaatgggccgacagcaagtcctgctgtgactactctctgcatgtggacatcagcgagtggcataagggcatccaggaggagatggaagcgcttgtgaaggatcacggggtaaattccttcctcgtgtacatggctttcaaagatcgcttccagctaacggattgccagatttatgaagtactgagtgtgatccgggatattggcgccatagcccaagtccacgcagaaaatggcgacatcattgcagaggagcagcagaggatcctggatctgggcatcacgggccccgagggacatgtgctgagccgacctgaggaggtcgaggccgaagccgtgaatcgtgccatcaccatcgccaaccagaccaactgcccgctgtatatcaccaaggtgatgagcaaaagctctgctgaggtcatcgcccaggcacggaagaagggaactgtggtgtatggcgagcccatcactgccagcttgggaacggacggctcccattactggagcaagaactgggccaaggctgctgcctttgtcacctccccacccttgagccctgatccaaccactccagactttctcaactccttgctgtcctgtggagacctccaggtcacgggcagtgcccattgcacgtttaacactgcccagaaggctgtaggaaaggacaacttcaccctgattccggagggcaccaatggcactgaggagcggatgtccgtcatctgggacaaggctgtggtcactgggaagatggatgagaaccagtttgtggctgtgaccagcaccaatgcagccaaagtcttcaacctttacccccggaaaggccgcattgctgtgggatccgatgccgacctggtcatctgggaccccgacagcgttaaaaccatctctgccaagacacacaacagctctctcgagtacaacatctttgaaggcatggagtgccgcggctccccactggtggtcatcagccaggggaagattgtcctggaggacggcaccctgcatgtcaccgaaggctctggacgctacattccccggaagcccttccctgattttgtttacaagcgtatcaaggcaaggagcaggctggctgagctgagaggggttcctcgtggcctgtatgacggacctgtgtgtgaagtgtctgtgacgcccaagacagtcactccagcctcctcggccaagacgtctcctgccaagcagcaggccccacctgtccggaacctgcaccagtctggattcagtttgtctggtgctcagattgatgacaacattccccgccgcaccacccagcgtatcgtggcgccccccggtggccgtgccaacatcaccagcctgggctagagctcctgggctgtgcgtccactggggactggggatgggacacctgaggacattctgagacttctttcttccttccttttttttttttgtttttttttttaagagcctgtgatagttactgtggagcagccagttcatggggtcccccttgggcccacaccccgtctctcaccaagagttactgattttgctcatccacttccctacacatctatgggtatcacacccaagactacccaccaagctcatacagggaaccacacccaacacttagacatgcgaacaagcagcccccagcgagggtctccttcgccttcaacctcctagtgtctgttagcattccttttcatggggggagggaagataaagtgaattgcccagagctgcctttttcttttctttttaaaaattttaagaagttttccttgtggggctggggaggggccggggtcagggagagtctttttttttttttttttaaatactaaattggaacatttaattccatattaatacaaggggtttgaactggacatcctaatgatgcaattacgtcatcacccagctgattccgggtggttggcaaactcatcgtgtctgtcctgagaggctccacaatgcccacccgcatcgccattctgtagtcttcagggtcagctgttgataaaggggcaggcttgcgttattggcctagattttgctgcagattaaatcctttgaggattctcttctcttttaccatttttctgcgtgctctcactctctctttctctctctagctttttaattcatgaatattttcgtgtctgtctctctctctctctgtgtttcctccagcccttgtctcggagacggtgttttcctcccttgccccattatcttttcacctcccaggtctacatttcatggtggtcgttgggtccgcctaaaggatttgagcgtttgccattgcaagcatagtgctgtgtcatcctggtccatgtaggactggtgctaaccacctgccatcatgaggatgtgtgctagagtgtgggaccctggccaagtgcaggaatgggccatgccgtctcacccacagtatcacacgtggaaccgcagacagggcccagaagctttagaggtatgaggctgcagaaccggagagattttcctctgtgcagtgctctctggctaaagtcacggtcaaacctaaacaccgagcctcattaacccaagtgaaccaaccaaagtcaccagttcagaagtgctaagctaataggagtctgacccgagggcctgctgcttcctggttaagtatcttttgagattctagaacacatgggagctttttattttcggggaaaaaccgtatttttttcttgtccaattatttctaaagacacactacatagaaagaggccctataaactcaaaaagtcattgggaaacttaaagtctattctactttgccaagaggagaaatgtgttttatgaacgatagatcacatcagaactcctgtggggaggaaaccttataaattaaacacatggcccccttagagaccacaggcgatgtctgtctccatccttccctctccttttctgtcacctttccccctagctggctcctttggacctacccctgtccttgctgacttgtgttgcattgtattccaaacgtgtttacaggttctcttaagcaatgttgtatttgcaggcttttctgaataccaaatctgctttttgtaaagcgtaaaaacatcacaaagtaggtcattccatcaccacccttgtctctctacacattttgcctttggggatctggttggggttttgggttttttgttgttgttgtttatttgttattttaaaggtaaattgcacttttaaaaaaataattggttgacttaatatatttgctttttttctcacctgcacttagaggaaatttgaacaagttggaaaaaaacaatttttgtttcaattctaagaaacacttgcagctctagtattcacttgagtcttcctgtttttcctgtaccgggtcatggtaatttttggttgttttggttgttttcttaaaaaacaagttaaaacctgacgatttctgcagtgacttgatgctctaaaacagtgtaggatttaagaatagatggtttttaatcctggaaattgtgattgtgacccatgagtggaggaactttcagttctaaagctgataaagtgtgtagccagaagagtactttttttttgtaaccactgtcttgatggcaaaataattatggtaaaaaacaagtctcgtgtttattattccttaagaactctgtgttatattaccatggaacgcctaataaagcaaaatgtggttgtttcaaaaaaaaaaaaaa

SEQ ID NO: 2179 - DNA, 349 bp, Homo sapiens
tttcaggtaacaaagtccagtctgttttatttttaacccaaatattccaaatatacagaaaattaccagtacaaagttaaacacattcagatttatttacacaatgctaaagaaatttgagttttatttccattttgtggaattttatcatggggtctggctttaatgtgtaactgacgtgggtcactgaaactcgattatcccacctcacatgcaattttctgtcctaagggaatagaaaacttgggtttttagggcacatgcagtaatgatcttaatactgctttacactttcgtgggaaggcagctgtcccacagcctggggaaggaccacatgctcagaaagggg

SEQ ID NO: 2180 - DNA, 378 bp, Homo sapiens
tttttttttttttttttttttttttttgtgtttaagagtttattaggataggcacataacagaaagctcaaaggacaacaaagctgcaccttcctaaaggctgaccctcaaagcaccattttgttagaactcagaggagaagctcgatctctgagccttccctcctcacagtttgggaaacatgcacaggatgaaggtaaatcctgcatagaaatcttgtaattccagaattagtcaaacaaatttgaaatacacacatttaaaaatacttacattctcatttagcgttcatgaagtgattactgacatttacaattacatctgacatcacagagcaagcctttgcagggatctaattcaagcttaagccaaatctat

SEQ ID NO: 2181 - DNA, 250 bp, Homo sapiens
cggggatttcccaatgattttattgaggtaacttttcccaattttatacatatatgcatttatatatacttaggaaagctaaacaatgttctaaggcacttggaattgtgcacagcaaagtatcctctaatattatacaactaaatagagcagaattttgctttttaaataacacaaataccagtacggaattaaaaaagggaatacatagtctttctttcaggttacaatagtggaatacaagtacata

SEQ ID NO: 2182 - DNA, 429 bp, Homo sapiens; identical to SEQ ID NO: 311

SEQ ID NO: 2183 - DNA, 1486 bp, Homo sapiens; identical to SEQ ID NO: 316

SEQ ID NO: 2184 - DNA, 327 bp, Homo sapiens
ttttttgaaaggtaagtaccattttatttagtgttgtaggaaatgttgggttacttcttaaaaacgaaaccaaagaaattcaaaagtcccaaagaaagaaagcaggaaataataattctataatccaaaaacgttgggcgatccttcagttggaggaagagggcgtcagttaagtagctcacacagtagatatggagacaccatatggagatacggagttaagtttggtggatactaggaattaagttctccacctaaggcaattaatttttcagccttgagagataattagtagttctagaaaaagaaaaaaagttgactgggaga

SEQ ID NO: 2185 - DNA, 406 bp, Homo sapiens
atgaaaacagagatctaaaaatttaatgatttaaaaatagcctctacatacaagatggcaaagagtaatacagattgaacatttggttttaaaaatgtgaaatgtctccacttagcgtagatcaatcaagtcagccatctcctaagaaatacacattatacaatgaaatctacaaagacacactttttaacttcaagcgttgttgattttcagcaaccctcttcccacatgaacatttccttgtaatgtaatgtatgacttttaatcttcttttggcagagtaggactttgagaattataatagcagttgttttgaaaagcaccttctatgatcatttatttccactgatttttttttaatcacgctgagatcatgcattcttgttttttaaatccttttctgttc

SEQ ID NO: 2186 - DNA, 194 bp, Homo sapiens; identical to SEQ ID NO: 1568
  misc_feature: n=a,t,g or c

SEQ ID NO: 2187 - DNA, 322 bp, Homo sapiens
  misc_feature: n=a,t,g or c
ntntctgtttaagtcatttatttcaatacaggcattgttttaaatttgcaccttgtctttaacacatttcataaccagagaacaggtctgagaacaagtacataaaaggattatttgacaaagttttaacaaaagtgcttacagcttatttgtttcagatatacagaactgccagtcacaaagagccactaagtgnaaatacagccacaaacttgcctggggaagtaaaatattttacatatttacactgtacatttaaatggggatattctgaaggcattattattatcaataaactctaaggcaggaggttctcttaaac

SEQ ID NO: 2188 - DNA, 446 bp, Homo sapiens; identical to SEQ ID NO: 436

SEQ ID NO: 2189 - DNA, 492 bp, Homo sapiens
  misc_feature: n=a,t,g or c
tttaaaactttttctctgcattttattttaagaaaacacaaacctggtcacaaaacatctttcagagaacaggataagtgaagaaacaaacaaaatgcacgggaatagcaaatttggggccacggtcatgttcaaggggcggctgacatgacatcattttgttcccggaaaagcaaggttaactcaagctgtgaagccagatggccaatagatttacagccatctaaagaagagcagaatctctccaagagctgaattatgatgacttgtaggtattgattagatgagaacaccaaccccatattcagcagagagttaggggaatgagaagtagaggggagatgggtgggtnggagatcgtctttatgtagttttcaaagtcacttcccgaaaaagaggatgagggtaattagttgaatatgcccagccacggacntgagggaccgggaggagtttgatgcgtttncccaatttttagccngggggttctct

SEQ ID NO: 2190 - DNA, 459 bp, Homo sapiens; identical to SEQ ID NO: 297
  misc_feature: n=a,t,g or c

SEQ ID NO: 2191 - DNA, 458 bp, Homo sapiens
  misc_feature: n=a,t,g or c
tttttttttttcccctaaatggtaggatttatttcaatgctcacatacaattgaatgagacaaactatttacataaaacataagtacaaaaaatataatacaatttatactgtacacaatcaggattcccttgttttgttccccccacaaatcggcagctagagatggtaagaagggggttggtaggaaagtgtgactgcacactcagcagtgctgaggatagatcttcagaatgctttttcataaagatgaatagggttgagatacagaaactgtcaatgcaccaagagcagtaagagagcacaacatattcacttctgtaataatagctatatattttttcttataaacgtgtttgtttctcaaagctgaggcttggagcaggtgtgagttgccttccattgattggttaggtgacctccgcccanccctgctccaacttccatagttgatccaat

SEQ ID NO: 2192 - DNA, 510 bp, Homo sapiens
ttttgtattcattgctttatttgtccttttcacgggtcactacattttagggcatttgatctataattggtagaacaggtttcaggcagggaggataggagcatcatcttccatccccatccacctccgctctttatcttgatgtcacaccaagtgtgatagcgcctccagcagtttcttcacagcttcagaagcctctggtcccagctcatttacacacttccttagcccctccacaaggtgctcaaagaaatgcccagagttttcagaagaagctttaatggatccataaagggaagaatgttgtccagaggtaaaggtgccaacttgtcaacaggaaggggcactttgttgatgaggaaggcagtagcagagtaactacaaaggctgatggtcaccagcaggaagatagttaccagcttccatgacagttactggggatatttttcaggagtttaaaaatcagaaaaactagcaaaatccaccaagcccagtggttccccccgtgcc

SEQ ID NO: 2193 - DNA, 405 bp, Homo sapiens; identical to SEQ ID NO: 1253
  misc_feature: n=a,t,g or c

SEQ ID NO: 2194 - DNA, 327 bp, Homo sapiens
ttttttgaaaatgatattaattttattgcatcattttactgactagaacgccagacttagagtggatataagtataaaaataaccaaattcttacaaataatactttgctgctacagtactgaataattagtggaggttgcaattataatacaactttaaataacattctcataatgggtttaacacaatcaaccaggggctaaggtttaaaggtttacaaagagaaatccaggacaacatgaaaactcccaaagttcatattccagctaaatgcttcatttaaccgtcaatccaccaacacaaacattaacaaaactcagagcaac

SEQ ID NO: 2195 - DNA, 422 bp, Homo sapiens
gcacagtcttacatattccagtcaaggtctatgaatacagaccctcaacaaacaggaagcagctttaaaaatgtatcaaattgctatagtcaattcctacactccagcttgtagttttctttgtttcaggattagacacagaacccattcttcaaggactcggcaaaagttctagaaacaaacaccatggtggtggaagcggttgcgttgcttcagtgatcacctagatttggtgtctttggtttcagtgttctggttactgaaggaatcccggatctttacaacttcagctgcacacaaatgtccaaaagattttgtgtaccattctggcatgtggccccttaaagtcaactctgcacatgtaggtgagtttggattttcctggcccacagggttcaatcaaatacctgggacaaagagca

SEQ ID NO: 2196 - DNA, 380 bp, Homo sapiens
gtatagagtaaaatttattatagggttgtagaattcatacaacctaaactccttacagcattcagcacctacacaattttgtgcattccaaatacagatagtagtgagaaagaatcactgcattagttaaaaatgactgtctcatgaaaattcgttcacatataagtcaggttaattacagagcacctaacagaactgcaaagatgtaatttctaaattcaagaaagttgtacaaaatgaaaaacaaaagaaaccaacaatgttgagatctgatatattttacacaaaaagttcaaaaacaatttaaaatatttcaaattttaaaattgctccaccataagatgaataaagagcttacttaaaggaaaagaaaaaaggaa

SEQ ID NO: 2197 - DNA, 340 bp, Homo sapiens; identical to SEQ ID NO: 302
  misc_feature: n=a,t,g or c

SEQ ID NO: 2198 - DNA, 202 bp, Homo sapiens
  misc_feature: n=a,t,g or c
gatccacctcatatgtgagtccgtccaaaagatgttactgctctgggtgggccagtgcttctatatcggttatactaacttncatttaaagtatttattctaaaatgcctctgagaaacagtaaaaaataaaaacaacaagttgtctaaaatgcaacagcttttatagtaaatgtacatttataaataaaatactcaaatca

SEQ ID NO: 2199 - DNA, 308 bp, Homo sapiens
ttttttcagataaaatattataggtttatttaaaacttaattctcaccttgagtatgcaaaatacaaactccacaaaatgttcattttactttgtagtttacaaatatacaaaatagacgtttgcttaaatttatattacatatttattaaggcaaggaactatatagaaaaacacatttgttctgcttaaggcatacttgggaataaaccattgtacaaattattgcacatctgaaaccacagtgcataacagactgtctgcataaaaatgctaaagaagtaaaccaggtatattacctgacttagg

SEQ ID NO: 2200 - DNA, 258 bp, Homo sapiens; identical to SEQ ID NO: 474
  misc_feature: n=a,t,g or c

SEQ ID NO: 2201 - DNA, 374 bp, Homo sapiens
  misc_feature: n=a,t,g or c
atgangcactccaagtgccatatatctattttattcttcaggaaattatatttttcttttacaagagcacaacaggaaccaaagtaaaagagtaatagatacagcactcaggataaatcatatctttaaaataataataaaaaaatttacaccttgtcctatatcctgttagtattttcataatatggccatgattgaaaaaacaaaaagcaagcatctacaattttttttgataaagactttttatgccaggaatggattaattaccaacaaaatttatactaatcaggctgatgtcaatctatttttgtaatgtatcattaacaaatttattttggaaaagataaaaatattgctccttgataataaatcnt

SEQ ID NO: 2202 - DNA, 366 bp, Homo sapiens
aatttaacaagttgatatatatatatatatatatatatattatcaagtataacacagtcatacaaaaacatttagtagaaatataattcacacataaaaacagtctacttattttttgtcccttttatatcctattttaggcaaaatgataaaacccagaaaataacaggaatgtactagtcctaaaaactggaccttttataaatgaaacagatccgatcacctataccttctctcaaattccaaataatgaggcttactgacctgtactctcagaatcaacttaaatacattttagcttgatttggatgaaatatgtactttcagttgttgacaatccaggtagaacaagtacataaaatgatt

SEQ ID NO: 2203 - DNA, 318 bp, Homo sapiens
  misc_feature: n=a,t,g or c
aaattttagaatattttaatgtccatttcttcagtgaatgcattttgaaattattagaattaacaatttaaaaagagcagataaaaggatatatggaaaatgcaaacagtcggttcttgctaattcaatttcagattctaggcatgatgtgattttccaaacaaccaattaaaaaaaactccttacctcgaaaatctagaaattcaaatgcagacgtgtctttggaaactacaaatgattacagcccatgtgacaggaagcacgcggccttcggctctccggntcgtgtgcaaatgtgcagggggagcccccgcgggt

SEQ ID NO: 2204 - DNA, 406 bp, Homo sapiens; identical to SEQ ID NO: 1315

SEQ ID NO: 2205 - DNA, 2808 bp, Homo sapiens
cggcatgagaggccagcctgccagggaaatccaggaatctgcaacaaaaacgatgacagtctgaaatactctctggtgccaacctccaaattctcgtctgtcacttcagacccccactagttgacagagcagcagaatatcaactccagtagacttgaatgtgcctctgggcaaagaagcagagctaacgaggaaagggatttaaagagtttttcttgggtgtttgtcaaacttttattccctgtctgtgtgcagaggggattcaacttcaattttctgcagtggctctgggtccagccccttacttaaagatctggaaagcatgaagactgggccttttttcctatgtctcttgggaactgcagctgcaatcccgacaaatgcaagattattatctgatcattccaaaccaactgctgaaacggtagcacctgacaacactgcaatccccagtttatgggctgaagctgaagaaaatgaaaaagaaacagcagtatccacagaagacgattcccaccataaggctgaaaaatcatcagtactaaagtcaaaagaggaaagccatgaacagtcagcagaacagggcaagagttctagccaagagctgggattgaaggatcaagaggacagtgatggtcacttaagtgtgaatttggagtatgcaccaactgaaggtacattggacataaaagaagatatgattgagcctcaggagaaaaaactctcagagaacactgattttttggctcctggtgttagttccttcacagattctaaccaacaagaaagtatcacaaagagagaggaaaaccaagaacaacctagaaattattcacatcatcagttgaacaggagcagtaaacatagccaaggcctaagggatcaaggaaaccaagagcaggatccaaatatttccaatggagaagaggaagaagaaaaagagccaggtgaagttggtacccacaatgataaccaagaaagaaagacagaattgcccagggagcatgctaacagcaagcaggaggaagacaatacccaatctgatgatattttggaagagtctgatcaaccaactcaagtaagcaagatgcaggaggatgaatttgatcagggtaaccaagaacaagaagataactccaatgcagaaatggaagaggaaaatgcatcgaacgtcaataagcacattcaagaaactgaatggcagagtcaagagggtaaaactggcctagaagctatcagcaaccacaaagagacagaagaaaagactgtttctgaggctctgctcatggaacctactgatgatggtaataccacgcccagaaatcatggagttgatgatgatggcgatgatgatggcgatgatggcggcactgatggccccaggcacagtgcaagtgatgactacttcatcccaagccaggcctttctggaggccgagagagctcaatccattgcctatcacctcaaaattgaggagcaaagagaaaaagtacatgaaaatgaaaatataggtaccactgagcctggagagcaccaagaggccaagaaagcagagaactcatcaaatgaggaggaaacgtcaagtgaaggcaacatgagggtgcatgctgtggattcttgcatgagcttccagtgtaaaagaggccacatctgtaaggcagaccaacagggaaaacctcactgtgtctgccaggatccagtgacttgtcctccaacaaaaccccttgatcaagtttgtggcactgacaatcagacctatgctagttcctgtcatctattcgctactaaatgcagactggaggggaccaaaaaggggcatcaactccagctggattattttggagcctgcaaatctattcctacttgtacggactttgaagtgattcagtttcctctacggatgagagactggctcaagaatatcctcatgcagctttatgaagccaactctgaacatgctggttatctaaatgagaagcagagaaataaagtcaagaaaatttacctggatgaaaagaggcttttggctggggaccatcccattgatcttctcttaagggactttaagaaaaactaccacatgtatgtgtatcctgtgcactggcagtttagtgaacttgaccaacaccctatggatagagtcttgacacattctgaacttgctcctctgcgagcatctctggtgcccatggaacactgcataacccgtttctttgaggagtgtgaccccaacaaggataagcacatcaccctgaaggagtggggccactgctttggaattaaagaagaggacatagatgaaaatctcttgttttgaacgaagattttaaagaactcaactttccagcatcctcctctgttctaaccacttcagaaatatatgcagctgtgatacttgtagatttatatttagcaaaatgttagcatgtatgacaagacaatgagagtaattgcttgacaacaacctatgcaccaggtatttaacattaactttggaaacaaaaatgtacaattaagtaaagtcaacatatgcaaaatactgtacattgtgaacagaagtttaattcatagtaatttcactctctgcattgacttatgagataattaatgattaaactattaatgataaaaataatgcatttgtattgttcataatatcatgtgcacttcaagaaaatggaatgctactcttttgtggtttacgtgtattattttcaatatcttaataccctaataaagagtccataaaaatccaaaaaaaaaaaaaaaaaaaaaaaaaaaaaaaaaaaaaaaaaaaaaaaaaaaaaa

SEQ ID NO: 2206 - DNA, 228 bp, Homo sapiens
ttttttttttttttctcttcaaatatttaatcagtttggagacctctgcattccaatccaattgggtaaaaattctaaagaaagcaagattaaggggtcctcaaagaaaacactgggctaaaatggagaggagactgggtttgggaagacagaacatagcatgtgtctgaaggcctttcgaaggaattctacgacatattttttaaaaatactccaaatgaacaagac

SEQ ID NO: 2207 - DNA, 224 bp, Homo sapiens; identical to SEQ ID NO: 388

SEQ ID NO: 2208 - DNA, 434 bp, Homo sapiens
  misc_feature: n=a,t,g or c
ttttttttttttttttttactttgttctttcttttttatttagtcacaacacatcagtacaacagaggtcaaacccagttcagtggaggtcgtttaactacacctgctaaaagaataaacctgaaaaatgatattttatagcccaaatcaaattaaataaatcaaagagaaggaggcaggaaagcccttttaaataccttggcaaccacagttccatgcaccaaaaggaaaactcacataaaantttccagttaaaagaaaatatgggcagtcccgggnaaattaggttatgcatttaacagtttccactgtactacttcaattgaccactcggcacaccatgatcacttatccatgtttaacatttgtgaatttgaggatccgtgtgattaaaaaattctttgtgttgctgggggctgggtaaatgcgggcgt

SEQ ID NO: 2209 - DNA, 7621 bp, Homo sapiens; identical to SEQ ID NO: 307

SEQ ID NO: 2210 - DNA, 3775 bp, Homo sapiens
cattcataagactcagagctacggccacggcagggacacgcggaaccaagacttggaaacttgattgttgtggttcttcttgggggttatgaaatttcattaatcttttttttttccggggagaaagtttttggaaagattcttccagatatttcttcattttcttttggaggaccgacttactttttttggtcttctttattactcccctccccccgtgggacccgccggacgcgtggaggagaccgtagctgaagctgattctgtacagcgggacagcgctttctgcccctgggggagcaacccctccctcgcccctgggtcctacggagcctgcactttcaagaggtacagcggcatcctgtgggggcctgggcaccgcaggaagactgcacagaaactttgccattgttggaacgggacgttgctccttccccgagcttccccggacagcgtactttgaggactcgctcagctcaccggggactcccacggctcaccccggacttgcaccttacttccccaacccggccatagccttggcttcccggcgacctcagcgtggtcacaggggcccccctgtgcccagggaaatgtttcaggctttccccggagactacgactccggctcccggtgcagctcctcaccctctgccgagtctcaatatctgtcttcggtggactccttcggcagtccacccaccgccgcggcctcccaggagtgcgccggtctcggggaaatgcccggttccttcgtgcccacggtcaccgcgatcacaaccagccaggacctccagtggcttgtgcaacccaccctcatctcttccatggcccagtcccaggggcagccactggcctcccagcccccggtcgtcgacccctacgacatgccgggaaccagctactccacaccaggcatgagtggctacagcagtggcggagcgagtggcagtggtgggccttccaccagcggaactaccagtgggcctgggcctgcccgcccagcccgagcccggcctaggagaccccgagaggagacgctcaccccagaggaagaggagaagcgaagggtgcgccgggaacgaaataaactagcagcagctaaatgcaggaaccggcggagggagctgaccgaccgactccaggcggagacagatcagttggaggaagaaaaagcagagctggagtcggagatcgccgagctccaaaaggagaaggaacgtctggagtttgtgctggtggcccacaaaccgggctgcaagatcccctacgaagaggggcccgggccgggcccgctggcggaggtgagagatttgccgggctcagcaccggctaaggaagatggcttcagctggctgctgccgcccccgccaccaccgcccctgcccttccagaccagccaagacgcaccccccaacctgacggcttctctctttacacacagtgaagttcaagtcctcggcgaccccttccccgttgttaacccttcgtacacttcttcgtttgtcctcacctgcccggaggtctccgcgttcgccggcgcccaacgcaccagcggcagtgaccagccttccgatcccctgaactcgccctccctcctcgctcggtgaactctttagacacacaaaacaaacaaacacatgggggagagagacttggaagaggaggaggaggaggagaaggaggagagagaggggaagagacaaagtgggtgtgtggcctccctggctcctccgtctgaccctctgcggccactgcgccactgccatcggacaggaggattccttgtgttttgtcctgcctcttgtttctgtgccccggcgaggccggagagctggtgactttggggacagggggtgggaaggggatggacacccccagctgactgttggctctctgacgtcaacccaagctctggggatgggtggggaggggggcgggtgacgcccaccttcgggcagtcctgtgtgaggatgaagggacgggggtgggaggtaggctgtggggtgggctggagtcctctccagagaggctcaacaaggaaaaatgccactccctacccaatgtctcccacacccaccctttttttggggtgcccaggttggtttcccctgcactcccgaccttagcttattgatcccacatttccatggtgtgagatcctctttactctgggcagaagtgagcccccccttaaagggaattcgatgcccccctagaataatctcatccccccacccgacttcttttgaaatgtgaacgtccttccttgactgtctagccactccctcccagaaaaactggctctgattggaatttctggcctcctaaggctccccaccccgaaatcagcccccagccttgtttctgatgacagtgttatcccaagaccctgccccctgccagccgaccctcctggccttcctcgttgggccgctctgatttcaggcagcaggggctgctgtgatgccgtcctgctggagtgatttatactgtgaaatgagttggccagattgtggggtgcagctgggtggggcagcacacctctggggggataatgtccccactcccgaaagcctttcctcggtctcccttccgtccatcccccttcttcctcccctcaacagtgagttagactcaagggggtgacagaaccgagaagggggtgacagtcctccatccacgtggcctctctctctctcctcaggaccctcagccctggcctttttctttaaggtcccccgaccaatccccagcctaggacgccaacttctcccaccccttggcccctcacatcctctccaggaaggcagtgaggggctgtgacatttttccggagaagatttcagagctgaggctttggtacccccaaacccccaatatttttggactggcagactcaaggggctggaatctcatgattccatgcccgagtccgcccatccctgaccatggttttggctctcccaccccgccgttccctgcgcttcatctcatgaggatttctttatgaggcaaatttatattttttaatatcggggggtggaccacgccgccctccatccgtgctgcatgaaaaacattccacgtgccccttgtcgcgcgtctcccatcctgatcccagacccattccttagctatttatccctttcctggtttccgaaaggcaattatatctattatgtataagtaaatatattatatatggatgtgtgtgtgtgcgtgcgcgtgagtgtgtgagcgcttctgcagcctcggcctaggtcacgttggccctcaaagcgagccgttgaattggaaactgcttctagaaactctggctcagcctgtctcgggctgacccttttctgatcgtctcggcccctctgattgttcccgatggtctctctccctctgtcttttctcctccgcctgtgtccatctgaccgttttcacttgtctcctttctgactgtccctgccaatgctccagctgtcgtctgactctgggttcgttggggacatgagattttattttttgtgagtgagactgagggatcgtagatttttacaatctgtatctttgacaattctgggtgcgagtgtgagagtgtgagcagggcttgctcctgccaaccacaattcaatgaatccccgacccccctaccccatgctgtacttgtggttctctttttgtattttgcatctgaccccggggggctgggacagattggcaatgggccgtcccctctccccttggttctgcactgttgccaataaaaagctcttaaaaacgc

SEQ ID NO: 2211 - DNA, 407 bp, Homo sapiens
gtcattaatatgatctttaataaacggaataacgcaccattttacagcaagcctttttaaacctaaagaactgccttaaaatctccttctccaatgtctctgtatcaatacaatctttttatttaggtttatatatatcaaagcatttacttacacttattcatagaaaactctttagtggcttaatgtcagctttcatagtggcatccatagataatacaaaagaaaagtgatttgctttattttatactcacactgatccatcaaacacaacttatacagcatagcaaggcttcagacagcttatacaaaagcaaaataactgaaattattcataaagtcatatatgatagtctatctgtaatgtaagagcaaaacacaccaacaaaagatacccgttaacaaga

SEQ ID NO: 2212 - DNA, 515 bp, Homo sapiens
tttttgcataatgagcgcattttattaaatagatagttaacgcactgcttcttactcattccaagttgctgtaggtgctgcccgcattaacagcagggacaaaagcttcctatgcgcgtttcagcaggaatactctctccactccaggtacttctttgttttggatttttttggcatgatttccttcccatgtaaagaaagccaacttcttcaagacacaggtcattcagctttagtggtggcctccaggttctccttgggccgtgcagaaggccaggtcccgcacagtgaggccctcctttgtcctccactgaaagcttttcactgttcggtctgcaaagaaagaggttcgcctgcccctgctccactcgccagggtggaagtggtggagggctgggaaagggctttcttcacagggcagtgctctcggtatcattgtctatatccagcaggatgcggccaggcacgtctttgctggctgagtctgagtgcatttcaggaaagatgctgcgatg

SEQ ID NO: 2213 - DNA, 408 bp, Homo sapiens; identical to SEQ ID NO: 486

SEQ ID NO: 2214 - DNA, 531 bp, Homo sapiens
tactattaaccattgtatatttatttaaaagccataaagaatacgaaaaagcatgaacgcacaaattccagagaatttgttttttaatcaatccgatcaattttacacaacaaaatatcattaagaaacatagaaatcatgtgaattgtattaaaactatgacatatgacaatattatataaagaaaattttaactctaagagacaaatataattttttaaaaaagaaattaaaaatatcacgtcttatgctaaatatatatagatatatttattatgatgcagcaggttttggaatacagggatttaggcaagttaaaaataaaaagtttatatgcttaaactttctgaatattgtttgtctgatttcctatttaaatatcagacatcattataggaaatacatagtctacttacgattgcaatggcactttcaaatataaggcaattaatattttagaaagcagcaacttttactttttttaaaaaaaaaagctagtagcagcatgtaaaaatgagcattacgagaaac

SEQ ID NO: 2215 - DNA, 7596 bp, Homo sapiens
gtggtcgcggctggggacgtgcgcccgcgccaccatcttcggctgaagaggcaattgcttttggatcgttccatttacaatggcgcagagaactggactcgaggatccagagaggtatctctttgtggacagggctgtcatctacaaccctgccactcaagctgattggacagctaaaaagctagtgtggattccatcagaacgccatggttttgaggcagctagtatcaaagaagaacggggagatgaagttatggtggagttggcagagaatggaaagaaagcaatggtcaacaaagatgatattcagaagatgaacccacctaagttttccaaggtggaggatatggcagaattgacatgcttgaatgaagcttccgttttacataatctgaaggatcgctactattcaggactaatctatacttattctggactcttctgtgtagttataaacccttacaagaatcttccaatttactctgagaatattattgaaatgtacagagggaagaagcgtcatgagatgcctccacacatctatgctatatctgaatctgcttacagatgcatgcttcaagatcgtgaggaccagtcaattctttgcacgggtgagtcaggtgctgggaagacagaaaatacaaagaaagttattcagtaccttgcccatgttgcttcttcacataaaggaagaaaggaccataatattcctggggaacttgaacggcagcttttgcaagcaaatccaattctcgaatcatttggaaatgcgaagactgtgaaaaatgataactcatctcgttttggcaaatttattcggatcaactttgatgtaactggctatatcgttggggccaacattgaaacataccttctggaaaagtctcgtgctgttcgtcaagcaaaagatgaacgtacttttcatatcttttaccagttgttatctggagcaggagaacacctaaagtctgatttgcttcttgaaggatttaataactacaggtttctctccaatggctatattcctattccgggacagcaagacaaagataatttccaggagaccatggaagcaatgcacataatgggcttctcccatgaagagattctgtcaatgcttaaagtagtatcttcagtgctacagtttggaaatatttctttcaaaaaggagagaaatactgatcaagcttccatgccagaaaatacagttgcgcagaagctctgccatcttcttgggatgaatgtgatggagtttactcgggccatcctgactccccggatcaaggtcggccgagactatgtgcaaaaagcccagaccaaagaacaggcagattttgcagtagaagcattggcaaaagctacctatgagcggctctttcgctggctcgttcatcgcatcaataaagctctggataggaccaaacgtcagggagcatctttcattggaatcctggatattgctggatttgaaatttttgagctgaactcctttgaacaactttgcatcaactacaccaatgagaagctgcagcagctgttcaaccacaccatgtttatcctagaacaagaggaataccagcgcgaaggcatcgagtggaacttcatcgatttcgggctggatctgcagccatgcatcgacctaatagagagacctgcgaaccctcctggtgtactggcccttttggatgaagaatgctggttccctaaagccacagataaaacctttgttgaaaaactggttcaagagcaaggttcccactccaagtttcagaaacctcgacaattaaaagacaaagctgatttttgcattatacattatgcagggaaggtggactataaggcagatgagtggctgatgaagaatatggaccccctgaatgacaacgtggccacccttttgcaccagtcatcagacagatttgtggcagagctttggaaagatgtggaccgtatcgtgggtctggatcaagtcactggtatgactgagacagcttttggctccgcatataaaaccaagaagggcatgtttcgtaccgttgggcaactctacaaagaatctctcaccaagctgatggcaactctccgaaacaccaaccctaactttgttcgttgtatcattccaaatcacgagaagagggctggaaaattggatccacacctagtcctagatcagcttcgctgtaatggtgtcctggaagggatccgaatctgtcgccagggcttccctaaccgaatagttttccaggaattcagacagagatatgagatcctaactccaaatgctattcctaaaggttttatggatggtaaacaggcctgtgaacgaatgatccgggctttagaattggacccaaacttgtacagaattggacagagcaagatatttttcagagctggagttctggcacacttagaggaagaaagagatttaaaaatcaccgatatcattatcttcttccaggccgtttgcagaggttgcctggccagaaaggcctttgccaagaagcagcagcaactaagtgccttaaaggtcttgcagcggaactgtgccgcgtacctgaaattacggcactggcagtggtggcgagtcttcacaaaggtgaagccgcttctacaagtgactcgccaggaggaagaacttcaggccaaagatgaagagctgttgaaggtgaaggagaagcagacaaaggtggaaggagagctggaggagatggagcggaagcaccagcagcttttagaagagaagaatatccttgcagaacaactacaagcagagactgagctctttgctgaagcagaagagatgagggcaagacttgctgctaaaaagcaggaattagaagagattctacatgacttggagtctagggttgaagaagaagaagaaagaaaccaaatcctccaaaatgaaaagaaaaaaatgcaagcacatattcaggacctggaagaacagctagacgaggaggaaggggctcggcaaaagctgcagctggaaaaggtgacagcagaggccaagatcaagaagatggaagaggagattctgcttctcgaggaccaaaattccaagttcatcaaagaaaagaaactcatggaagatcgcattgctgagtgttcctctcagctggctgaagaggaagaaaaggcgaaaaacttggccaaaatcaggaataagcaagaagtgatgatctcagatttagaagaacgcttaaagaaggaagaaaagactcgtcaggaactggaaaaggccaaaagaaaactcgacggggagacgaccgacctgcaggaccagatcgcagagctgcaggcgcagattgatgagctcaagctgcagctggccaagaaggaggaggagctgcagggcgcactggccagaggtgatgatgaaacactccataagaacaatgcccttaaagttgtgcgagagctacaagcccaaattgctgaacttcaggaagactttgaatccgagaaggcttcacggaacaaggccgaaaagcagaaaagggacttgagtgaggaactggaagctctgaaaacagagctggaggacacgctggacaccacggcagcccagcaggaactacgtacaaaacgtgaacaagaagtggcagagctgaagaaagctcttgaggaggaaactaagaaccatgaagctcaaatccaggacatgagacaaagacacgcaacagccctggaggagctctcagagcagctggaacaggccaagcggttcaaagcaaatctagagaagaacaagcagggcctggagacagataacaaggagctggcgtgtgaggtgaaggtcctgcagcaggtcaaggctgagtctgagcacaagaggaagaagctcgacgcgcaggtccaggagctccatgccaaggtctctgaaggcgacaggctcagggtggagctggcggagaaagcaagtaagctgcagaatgagctagataatgtctccacccttctggaagaagcagagaagaagggtattaaatttgctaaggatgcagctagtcttgagtctcaactacaggatacacaggagcttcttcaggaggagacacgccagaaactaaacctgagcagtcggatccggcagctggaagaggagaagaacagtcttcaggagcagcaggaggaggaggaggaggccaggaagaacctggagaagcaagtgctggccctgcagtcccagttggctgataccaagaagaaagtagatgacgacctgggaacaattgaaagtctggaagaagccaagaagaagcttctgaaggacgcggaggccctgagccagcgcctggaggagaaggcactggcgtatgacaaactggagaagaccaagaaccgcctgcagcaggagctggacgacctcacggtggacctggaccaccagcgccaggtcgcctccaacttggagaagaagcagaagaagtttgaccagctgttagcagaagagaagagcatctctgctcgctatgccgaagagcgggaccgggccgaagccgaggccagagagaaagaaaccaaagccctgtcactggcccgggccctcgaggaagccctggaggccaaggaggagtttgagaggcagaacaagcagctccgagcagacatggaagacctcatgagctccaaagatgatgtgggaaaaaacgttcacgaacttgaaaaatccaaacgggccctagagcagcaggtggaggaaatgaggacccagctggaggagctggaagacgaactccaggccacggaagatgccaagcttcgtctggaggtcaacatgcaggccatgaaggcgcagttcgagagagacctgcaaaccagggatgagcagaatgaagagaagaagcggctgctgatcaaacaggtgcgggagctcgaggcggagctggaggatgagaggaaacagcgggcgcttgctgtagcttcgaagaaaaagatggagatagacctgaaggacctcgaagcccaaatcgaggctgcgaacaaagctcgggatgaggtgattaagcagctccgcaagctccaggctcagatgaaggattaccaacgtgaattagaagaagctcgtgcatccagagatgagatttttgctcaatccaaagagagtgaaaagaaattgaagagtctggaagcagaaatccttcaattgcaggaggaacttgcctcatctgagcgagcccgccgacacgccgagcaggagagagatgagctggcggacgagatcaccaacagcgcctctggcaagtccgcgctgctggatgagaagcggcgtctggaagctcggatcgcacagctggaggaggagctggaagaggagcagagcaacatggagctgctcaacgaccgcttccgcaagaccactctacaggtggacacactgaacgccgagctagcagccgagcgcagcgccgcccagaagagtgacaatgcacgccagcaactggagcggcagaacaaggagctgaaggccaagctgcaggaactcgagggtgctgtcaagtctaagttcaaggccaccatctcagccctggaggccaagattgggcagctggaggagcagcttgagcaggaagccaaggaacgagcagccgccaacaaattagtccgtcgcactgagaagaagctgaaagaaatcttcatgcaggttgaggatgagcgtcgacacgcggaccagtataaagagcagatggagaaggccaacgctcggatgaagcagcttaaacgccagctggaggaagcagaagaagaagcgacgcgtgccaacgcatctcggcgtaaactccagcgggaactggatgatgccaccgaggccaacgagggcctgagccgcgaggtcagcaccctgaagaaccggctgaggcggggtggccccatcagcttctcttccagccgatctggccggcgccagctgcaccttgaaggagcttccctggagctctccgacgatgacacagaaagtaagaccagtgatgtcaacgagacgcagccaccccagtcagagtaaagttgcaggaagccagaggaggcaatacagtgggacagttaggaatgcacccggggcctcctgcagatttcggaaattggcaagctacgggattccttcctgaaagatcaactgtgtcttaaggctctccagcctatgcatactgtatcctgcttcagacttaggtacaattgctcccctttttatatacagacacacacaggacacatatattaaacagattgtttcatcattgcatctattttccatatagtcatcaagagaccattttataaaacatggtaagaccctttttaaaacaaactccaggcccttggttgcgggtcgctgggttattggggcagcgccgtggtcgtcactcagtcgctctgcatgctctctgtcatacagacaggtaacctagttctgtgttcacgtggcccccgactcctcagccacatcaagtctcctagaccactgtggactctaaactgcacttgtctctctcatttccttcaaataatgatcaatgctatttcagtgagcaaactgtgaaaggggctttggaaagagtaggaggggtgggctggatcggaagcaacacccatttggggttaccatgtccatcccccaaggggggccctccccctcgagtcgatggtgtcccgcatctactcatgtgaactggccttggcgagggctggtctgtgcatagaagggatagtggccacactgcagctgaggccccaggtggcagccatggatcatgtagacttccagatggtctcccgaaccgcctggctctgccggcgccctcctcacgtcaggagcaagcagccgtggacccctaagccgagctggtggaaggcccctccccgtcgccagccgggccctcatgctgaccttgcaaattcagccgctgctttgagcccaaaatgggaatattggttttgtgtccgaggcttgttccaagtttgtcaatgaggtttatggagcctccagaacagatgccatcttcctgaatgttgacatgccagtgggtgtgactccttcatttttccttctcccttccctttggacagtgttacagtgaacacttagcatcctgtttttggttggtagttaagcaaactgacattacggaaagtgccttagacactacagtactaagacaatgttgaatatatcattcgcctctataacaatttaatgtattcagttttgactgtgcttcatatcatgtacctctctagtcaaagtggtattacagacattcagtgacaatgaatcagtgttaattctaaatccttgatcctctgcaatgtgcttgaaaacacaaaccttttgggttaaaagctttaacatctattaggaagaatttgtcctgtgggtttggaatcttggattttccccctttatgaactgtactggctgttgaccaccagacacctgaccgcaaatatcttttcttgtattcccatatttctagacaatgatttttgtaagacaataaatttattcattatagatatttgcgcctgctctgtttacttgaagaaaaaagcacccgtggagaataaagagacctcaataaacaaaaaaaaaaa

SEQ ID NO: 2216 - DNA, 455 bp, Homo sapiens
tttttttttaccattttttttatatcctgcatttatttaagcaaaccaaatgtgtagagataggaaattaatgtgttataatgttttacaaatacagagagaaaacacagaatattaagaccctgaagagagtgcatttgagaacgcagttctatcataggagaccacttgcagggaacacattaaagccattgctgacacagccatctgtcattcctggtttgccgtcatttaagtagtttcaatagataaatcggtgatttgcttttaaacaaatattaatgttaatgattagggtagccttgaagggtttgtgagtgactgtactatacaatgtgatgctaggcttaatgtgtcatttcaatgctgttgtacattatgcaggggaaataatgtcttattacacattaactgcgacatccactaaaatgtgaactagtttgcataggttagtc

SEQ ID NO: 2217 - DNA, 3549 bp, Homo sapiens
cccctcttcctcctcctcaagggaaagctgcccacttctagctgccctgccatcccctttaaagggcgacttgctcagcgccaaaccgcggctccagccctctccagcctccggctcagccggctcatcagtcggtccgcgccttgcagctcctccagagggacgcgccccgagatggagagcaaagccctgctcgtgctgactctggccgtgtggctccagagtctgaccgcctcccgcggaggggtggccgccgccgaccaaagaagagattttatcgacatcgaaagtaaatttgccctaaggacccctgaagacacagctgaggacacttgccacctcattcccggagtagcagagtccgtggctacctgtcatttcaatcacagcagcaaaaccttcatggtgatccatggctggacggtaacaggaatgtatgagagttgggtgccaaaacttgtggccgccctgtacaagagagaaccagactccaatgtcattgtggtggactggctgtcacgggctcaggagcattacccagtgtccgcgggctacaccaaactggtgggacaggatgtggcccggtttatcaactggatggaggaggagtttaactaccctctggacaatgtccatctcttgggatacagccttggagcccatgctgctggcattgcaggaagtctgaccaataagaaagtcaacagaattactggcctcgatccagctggacctaactttgagtatgcagaagccccgagtcgtctttctcctgatgatgcagattttgtagacgtcttacacacattcaccagagggtcccctggtcgaagcattggaatccagaaaccagttgggcatgttgacatttacccgaatggaggtacttttcagccaggatgtaacattggagaagctatccgcgtgattgcagagagaggacttggagatgtggaccagctagtgaagtgctcccacgagcgctccattcatctcttcatcgactctctgttgaatgaagaaaatccaagtaaggcctacaggtgcagttccaaggaagcctttgagaaagggctctgcttgagttgtagaaagaaccgctgcaacaatctgggctatgagatcaataaagtcagagccaaaagaagcagcaaaatgtacctgaagactcgttctcagatgccctacaaagtcttccattaccaagtaaagattcatttttctgggactgagagtgaaacccataccaatcaggcctttgagatttctctgtatggcaccgtggccgagagtgagaacatcccattcactctgcctgaagtttccacaaataagacctactccttcctaatttacacagaggtagatattggagaactactcatgttgaagctcaaatggaagagtgattcatactttagctggtcagactggtggagcagtcccggcttcgccattcagaagatcagagtaaaagcaggagagactcagaaaaaggtgatcttctgttctagggagaaagtgtctcatttgcagaaaggaaaggcacctgcggtatttgtgaaatgccatgacaagtctctgaataagaagtcaggctgaaactgggcgaatctacagaacaaagaacggcatgtgaattctgtgaagaatgaagtggaggaagtaacttttacaaaacatacccagtgtttggggtgtttcaaaagtggattttcctgaatattaatcccagccctacccttgttagttattttaggagacagtctcaagcactaaaaagtggctaattcaatttatggggtatagtggccaaatagcacatcctccaacgttaaaagacagtggatcatgaaaagtgctgttttgtcctttgagaaagaaataattgtttgagcgcagagtaaaataaggctccttcatgtggcgtattgggccatagcctataattggttagaacctcctattttaattggaattctggatctttcggactgaggccttctcaaactttactctaagtctccaagaatacagaaaatgcttttccgcggcacgaatcagactcatctacacagcagtatgaatgatgttttagaatgattccctcttgctattggaatgtggtccagacgtcaaccaggaacatgtaacttggagagggacgaagaaagggtctgataaacacagaggttttaaacagtccctaccattggcctgcatcatgacaaagttacaaattcaaggagatataaaatctagatcaattaattcttaataggctttatcgtttattgcttaatccctctctcccccttcttttttgtctcaagattatattataataatgttctctgggtaggtgttgaaaatgagcctgtaatcctcagctgacacataatttgaatggtgcagaaaaaaaaaagataccgtaattttattattagattctccaaatgattttcatcaatttaaaatcattcaatatctgacagttactcttcagttttaggcttaccttggtcatgcttcagttgtacttccagtgcgtctcttttgttcctggctttgacatgaaaagataggtttgagttcaaattttgcattgtgtgagcttctacagattttagacaaggaccgtttttactaagtaaaagggtggagaggttcctggggtggattcctaagcagtgcttgtaaaccatcgcgtgcaatgagccagatggagtaccatgagggttgttatttgttgtttttaacaactaatcaagagtgagtgaacaactatttataaactagatctcctatttttcagaatgctcttctacgtataaatatgaaatgataaagatgtcaaatatctcagaggctatagctgggaacccgactgtgaaagtatgtgatatctgaacacatactagaaagctctgcatgtgtgttgtccttcagcataattcggaagggaaaacagtcgatcaagggatgtattggaacatgtcggagtagaaattgttcctgatgtgccagaacttcgaccctttctctgagagagatgatcgtgcctataaatagtaggaccaatgttgtgattaacatcatcaggcttggaatgaattctctctaaaaataaaatgatgtatgatttgttgttggcatcccctttattaattcattaaatttctggatttgggttgtgacccagggtgcattaacttaaaagattcactaaagcagcacatagcactgggaactctggctccgaaaaactttgttatatatatcaaggatgttctggctttacattttatttattagctgtaaatacatgtgtggatgtgtaaatggagcttgtacatattggaaaggtcattgtggctatctgcatttataaatgtgtggtgctaactgtatgtgtctttatcagtgatggtctcacagagccaactcactcttatgaaatgggctttaacaaaacaagaaagaaacgtacttaactgtgtgaagaaatggaatcagcttttaataaaattgacaacattttattaccac

SEQ ID NO: 2218 - DNA, 167 bp, Homo sapiens
tttatcatcgaaataatttatttaccactagagcaccacaaaaacagacatacatcgtgttaaaatacagcgtaattggtcatcaaaatacaaaacagctaatcttatattccattttttaaccatgccaacgatcaaattgtactgctgattaacacaaaaataat

SEQ ID NO: 2219 - DNA, 287 bp, Homo sapiens; identical to SEQ ID NO: 390

SEQ ID NO: 2220 - DNA, 432 bp, Homo sapiens
ttttttgatttgagtattttatttataaatgtacatttactataaaagctgttgcattttagacaacttgttgtttttattttttactgtttctcagaggcattttagaataaatactttaaatgaaagttagtataaccgatatagaacactggcccacccagagcagtaacatcttttggacggactcacatatgaggtggatcatttcagtttgttaaatcttacactgtgtatagataactataatatgtattgcattaatcacactacatagaaaggaaatgtcatggaagttcgctagtgaaaaacaaaaagttacccattatttttattaaagagtagggactagcttttggagtatgagaaaaaaaaatcagatatacttcctcaggaacaataaatcactcacttgcctcacctgttttttaa

SEQ ID NO: 2221 - DNA, 355 bp, Homo sapiens
ccagaagtaaggtaactttactcagataaaacacagatggtagcagatagaggccacaagctcatgggatgccattccagagggcccctcacccacagaggagcccctgtaggaaggaggcccaggccccatccgcacagcaagtcccggtgaggggctctaacacacccccactccagcctctggtcatggacacagcccatagcgggcacagcatcatgatggaatggactctgcaggccacgcatggctcctgggaacccccagcccctcccttctcctcccagcctttccagctgtcttcccaccaggagggctcggaggtcacagcacggaacgtcttccaagagcccct

SEQ ID NO: 2222 - DNA, 5316 bp, Homo sapiens
cggacgcgtgggaacgaagccacccattacggtatgatgatgtcaaacgtgatgctgatgctacagttacagcccctgctggcgcagcctctctgattctctctccctctccgcgtccagtgctgggctttttcagacaagtgcatctcctaaccaggtcacatttcagccgcgacccactctccgccagtcaccggaggcagaccgcgggaggagagctgaggacagccgcgtgcgcttcgccagcagcggggtgggaggaaggacattaaaatactgcagaagtcaagaccccccaggtcgaacccagaccacgatgcgcgccccgggctgcgggcggctggtgctgccgctgctgctcctggccgcggcagccctggccgaaggcgacgccaaggggctcaaggagggcgagacccccggcaatttcatggaggacgagcaatggctgtcgtccatctcgcagtacagcggcaagatcaagcactggaaccgcttccgagacgaagtggaggatgactatatcaagagctgggaggacaatcagcaaggagatgaagccctggataccaccaaggacccctgccagaaggtgaagtgcagccgccacaaggtgtgcattgcccagggctaccagcgggccatgtgcatcagtcgcaagaagctggagcacaggatcaagcagccgaccgtgaaactccatggaaacaaagactccatctgcaagccctgccacatggcccagcttgcctctgtctgcggctcagatggccacacttacagctctgtgtgtaagctggagcaacaggcgtgcctgagcagcaagcagctggcggtgcgatgcgagggcccctgcccctgccccacggagcaggctgccacctccaccgccgatggcaaaccagagacttgcaccggtcaggacctggctgacctgggagatcggctgcgggactggttccagctccttcatgagaactccaagcagaatggctcagccagcagtgtagccggcccggccagcgggctggacaagagcctgggggccagctgcaaggactccattggctggatgttctccaagctggacaccagtgctgacctcttcctggaccagacggagctggccgccatcaacctggacaagtacgaggtctgcatccgtcccttcttcaactcctgtgacacctacaaggatggccgggtctctactgctgagtggtgcttctgcttctggagggagaagcccccctgcctggcagagctggagcgcatccagatccaggaggccgccaagaagaagccaggcatcttcatcccgagctgcgacgaggatggctactaccggaagatgcagtgtgaccagagcagcggtgactgctggtgtgtggaccagctgggcctggagctgactggcacgcgcacgcatgggagccccgactgcgatgacatcgtgggcttctcgggggactttggaagcggtgtcggctgggaggatgaggaggagaaggagacggaggaagcaggcgaggaggccgaggaggaggagggcgaggcaggcgaggctgacgacgggggctacatctggtagacgccctcagaagccggctgccgggggggactcaacagcagagctctgagcagcagcaggcaacttcgagaacggatccagaaatgcagtcagaaggaccctgctccacctggggggactgggagtgtgagtgtgcatggcatgtgtgtggcacagatggctgggacgggtgacagtgtgagtgcatgtgtgcatgcatgtgtgtatgtgtgtgtgtgtgtggcatgcgctgacaaatgtgtccttgatccacactgctcctggcagagtgagtaacccaaaggccccttcggcctccttgtagctgttttctttccttttgttgttggttttaaaatacattcacacacaaatacaaattgacaggtcaaaatccatgaaatgagatcccccagccgtgtcctccagcccagccctgaccccttggtttctaccctggctccccttggtttctaccctggctcaaccgacccctgtctgcccttctccctcctgcttctgaggtcaagctctggcctgcgagcctgtccccattgcaaaggggagggaggggcagggagctgtctaccagctgaggtcctcccaaaactgggccgatgtggtgtgacatccccaccagcctcagatgagacgggccaggacgcccagccacagcaagccctgtccctttgccggatccccaaacactagagaagctctcctaacccaaggcggagaatgaaggtggtggcggcagaggaggagggcagcagctgagaggccagggacagggtgcctcgccaagctgtctgaggtctgtcccaggtggcccaggtggtgcaggtagaacagggtgaggagagggggtcggctcaacaggaggaggctgtggctgcagagcctggaggagcttttaggtgttgagatggggcagctctgaatcctagaccctggaatagcctgtcccttttctctgggtctcgtggtggagccatgatctgggctgctctcttggggacactgggtggtggttacacagttgacctctgcctggctcccccttggtgcaactcctgcctccatcccccttgctggggtcccctcatccacttgagggcgcctgagggccaggagcagcaggcaaggagcctgggtctaggctaagggggtgtgtgcccacctcctccctgacccttaacactcctgtcctgcccagaccaacagagagagctgtccctgagaccccggagagaagcagctgccgaaagctgcagcctttccgcactctgagaccatgatcttcctcctgccaggggagagccacccacaggccatgtccagccccacttccctcagcccccagggcttccttctggcccctctgaggattccctagggctgccccgcagaggggcttccccaagctctgttttgaagcctgcaatgtggaaaagtgagaagtcagagggaacaggacaggtgcagccgggctctgaggccacacctcacacctcgctgttccccaacatcccctgagcagtgtgagctcatctcaccagatgagaagaggccctgtgcatttcttttgtttgtttgttgctgttttcccccacccatccagttctcctcagcaaagcaaattccttaacacctttggtggagaatttcttacccagacttggggctgtgatgcccttcagtgcgtggtgagtgcagcgtgtgtgcgtgtgcctgtgtgtgaacctgggggccatcctggtggcctgggagcgtgaggagaggccccctgtgtgctgggtgagtggtgggtgtggggtcaatgcagtgaggctctctgggtgaggctcccaacctggcagtccccagcctcccagcatctgtgagcgtctgttggactttacagaagagcctcatcccgtctgcccctcactctgccctggaatcaacatcttccgagtccttcttgggggaaatagcagagccccacttaactccataaactgcttcccattccgcagcccagttctgattgttgaggtgtcgcgtcgttccaggtcccccagtcccctctttctcctgtcctctctctgtccttcacctccccactccagccccggctcagttcagggaaatgctgttccatatcagccctctgctctctgaggcagccgcgcctctgactcggagctacttgaaacttctgctcttgctaggattggagtctacctatctcttccatttgtcccagctggagttctggaactttcctcctcggggtgggggtgggggttgttaaggatgctggggggcctggggaaggaaggagttcagaggaagggtgtcccctgtcctcttgatgtcaccctccgctcctgggacacgtgctctctctgtctctgggtcttctggctgtgcacgtttgtgtgtccttgtaaatatgttttaggaagaaagcaaaagggactgaactagcctctggtaggattgcaggggtccagccttgcctgtttccgaagcccccacactgcctttcgccccactgagactggtcccctcaaaaggtagacaaaacagcagctccctgtggagctgaagggcggcctcaaagtggctttttgttagacaaggttaaggtttcctcatgagcaaggttgcagatcggtccttcctcagctccttgatttgtgaccttgaccaaggggcctgccacccagcccctccagtgccctctcctcgatgcctcgctccttcctgcccccactcccctggcttaggcaggtaggggaattagggccatgctggaagaagcttaaccatgtgttcaaagaacggtttcttgcttgcttggtcctggaactccccttggctgccccaggcctccttggcccatgggtgctgggggaggtggatgtcagatctggtaggttgcagcagagaaaataaatgtgccttgagagaccactcagagagggtccaagggtgatggagaaggaagcatggcctgggagcttggaagggaggggtggtgggtggcggcatcttgactgccccctgttgtcccacacgtggggggtggtcaccccccttcactccagcccgcctgccttcagccttccatgagcttcacctgcttccaacttcactttggagggggtggggtccgttggcatcaacacggggaccctctgcttcaccaaagcccgagccctcagcccctggggagaacaaatggctgagctttgatacctggggtcgtcgagaggctgcgggctggcggcagtcccaggggagagacaccacagaaggagacccagacatcccgaggaagttcccagcagagcaaactgctttccagcctgaagcctgcttaaactgtgtgatgtgcaataactgagcttagagttaggaattgtgttcaagtgcttggatttccgtctgtagatttaactgctgaaattgtatctctcagtaattttagatgtcttttaaaaaattgaaaaacaaagtgttagactgtgtgcgtgtgcgttgatgggcactcaagagtcccgtgagtcatccagccctgcctttcccctgcgcccccatcctctcacgtcccgccctgcctccacttggggaccctgcctcgtgtcgtctttatctgcctattactcagcctaaggaaacaagtacactccacacatgcataaaggaaatcaaatgttatttttaagaaaatggaaaataaaaactttataaacacc

SEQ ID NO: 2223 - DNA, 3073 bp, Homo sapiens
cctggggccaggactgctgctgtcactgccatccattggagcccagcaccccctccccgcccatccttcggacagcaactccagcccagccccgcgtccctgtgtccacttctcctgacccctcggccgccaccccagaaggctggagcagggacgccgtcgctccggccgcctgctcccctcgggtccccgtgcgagcccacgccggccccggtgcccgcccgcagccctgccactggacacaggataaggcccagcgcacaggcccccacgtggacagcatggaccgcggcacgctccctctggctgttgccctgctgctggccagctgcagcctcagccccacaagtcttgcagaaacagtccattgtgaccttcagcctgtgggccccgagaggggcgaggtgacatataccactagccaggtctcgaagggctgcgtggctcaggcccccaatgccatccttgaagtccatgtcctcttcctggagttcccaacgggcccgtcacagctggagctgactctccaggcatccaagcaaaatggcacctggccccgagaggtgcttctggtcctcagtgtaaacagcagtgtcttcctgcatctccaggccctgggaatcccactgcacttggcctacaattccagcctggtcaccttccaagagcccccgggggtcaacaccacagagctgccatccttccccaagacccagatccttgagtgggcagctgagaggggccccatcacctctgctgctgagctgaatgacccccagagcatcctcctccgactgggccaagcccaggggtcactgtccttctgcatgctggaagccagccaggacatgggccgcacgctcgagtggcggccgcgtactccagccttggtccggggctgccacttggaaggcgtggccggccacaaggaggcgcacatcctgagggtcctgccgggccactcggccgggccccggacggtgacggtgaaggtggaactgagctgcgcacccggggatctcgatgccgtcctcatcctgcagggtcccccctacgtgtcctggctcatcgacgccaaccacaacatgcagatctggaccactggagaatactccttcaagatctttccagagaaaaacattcgtggcttcaagctcccagacacacctcaaggcctcctgggggaggcccggatgctcaatgccagcattgtggcatccttcgtggagctaccgctggccagcattgtctcacttcatgcctccagctgcggtggtaggctgcagacctcacccgcaccgatccagaccactcctcccaaggacacttgtagcccggagctgctcatgtccttgatccagacaaagtgtgccgacgacgccatgaccctggtactaaagaaagagcttgttgcgcatttgaagtgcaccatcacgggcctgaccttctgggaccccagctgtgaggcagaggacaggggtgacaagtttgtcttgcgcagtgcttactccagctgtggcatgcaggtgtcagcaagtatgatcagcaatgaggcggtggtcaatatcctgtcgagctcatcaccacagcggaaaaaggtgcactgcctcaacatggacagcctctctttccagctgggcctctacctcagcccacacttcctccaggcctccaacaccatcgagccggggcagcagagctttgtgcaggtcagagtgtccccatccgtctccgagttcctgctccagttagacagctgccacctggacttggggcctgagggaggcaccgtggaactcatccagggccgggcggccaagggcaactgtgtgagcctgctgtccccaagccccgagggtgacccgcgcttcagcttcctcctccacttctacacagtacccatacccaaaaccggcaccctcagctgcacggtagccctgcgtcccaagaccgggtctcaagaccaggaagtccataggactgtcttcatgcgcttgaacatcatcagccctgacctgtctggttgcacaagcaaaggcctcgtcctgcccgccgtgctgggcatcacctttggtgccttcctcatcggggccctgctcactgctgcactctggtacatctactcgcacacgcgtgagtaccccaggcccccacagtgagcatgccgggcccctccatccacccgggggagcccagtgaagcctctgagggattgaggggccctggcaggaccctgacctccgcccctgcccccgctcccgctcccaggttcccccagcaagcgggagcccgtggtggcggtggctgccccggcctcctcggagagcagcagcaccaaccacagcatcgggagcacccagagcaccccctgctccaccagcagcatggcatagccccggccccccgcgctcgcccagcaggagagactgagcagccgccagctgggagcactggtgtgaactcaccctgggagccagtcctccactcgacccagaatggagcctgctctccgcgcctacccttcccgcctccctctcagaggcctgctgccagtgcagccactggcttggaacaccttggggtccctccaccccacagaaccttcaacccagtgggtctgggatatggctgcccaggagacagaccacttgccacgctgttgtaaaaacccaagtccctgtcatttgaacctggatccagcactggtgaactgagctgggcaggaagggagaacttgaaacagattcaggccagcccagccaggccaacagcacctccccgctgggaagagaagagggcccagcccagagccacctggatctatccctgcggcctccacacctgaacttgcctaactaactggcaggggagacaggagcctagcggagcccagcctgggagcccagagggtggcaagaacagtgggcgttgggagcctagctcctgccacatggagccccctctgccggtcgggcagccagcagagggggagtagccaagctgcttgtcctgggcctgcccctgtgtattcaccaccaataaatcagaccatgaaacctgaaaaaaaaaaaaa

SEQ ID NO: 2224 - DNA, 376 bp, Homo sapiens
  misc_feature: n=a,t,g or c
tttagagcaggagtgagagtttattaaaaagttttagagcaggaacaaaaggaagtacactacacttggatcaggcaggcaacttgagagatctaagtgccctgcctgacccttaacttggggttttatgtatttggcatagttctgggatttacgtctcanctcccctgattcttcccttccgcgtatgtggtgacctgccagcacttggaaggggtcgcatgcacagtgtgattactgaagttgcgcgcatgtcacttgaggcatttttccccttaccagtcgtgcgttcccagaggaaggtaggtcatatactggttaaatncgccattttgcctcttggtgcgcatntccaggctgcttgccantcctgaga

SEQ ID NO: 2225 - DNA, 275 bp, Homo sapiens
  misc_feature: n=a,t,g or c
tataatagaaaaatattttatttgtattgttgtataaaatatttacaatcatatagaatatatagagttacattttaatagcaactgtgtacatgtcacgaaaccatttcccttatcaaagatgtaatttgtaaacctcaaatagttgtgtatctcgtcctgttagaagtagatgacttcaattaaacaaatttatgaatcagaataatgtccttcataaatttgtttaattgaagtcatctacttctaacagggccgnggcacccnccatnttt

SEQ ID NO: 2226 - DNA, 519 bp, Homo sapiens
  misc_feature: n=a,t,g or c
aaccacanaagagtagcagtccattttctggaagngcgcatgatattatgancaatacaaatgcattatttttatcattaatagtntaatcattaattatcncanaagtcaatgcagagagtgaaattantntgaattaaacttcngttcanaatgtacagtattttgcatatgtngactttacttaatngtncattnttgtttccaaagttaangttaaatacctggtgcataggttgttgtcaagcaattactctcattgtcttgtcatacatgctaacattttgctaaatataaatctacaagtatcacagctgcatatatttctgaagtggttagaacagaggaggatgctggaaagttgagttctttaaaatcttcgttcaaaacaagagattttcatctatgtcctcttctttaattccaaagcagtggncccactccttcagggtgatgtgcttatccttnttggggtcacactccntcaaataaacgggttatgccagtgttccatgggcc

SEQ ID NO: 2227 - DNA, 384 bp, Homo sapiens
ccaaaataacttttattactatataaaagaagtcaagaaaaaatagatgcatatttttcctacaaaattataaaatattcaggatagttaatattttttccataaatgcgctaagataaaaagatagaaatctttttcacttaaggttttcgagtaccttgtaggaattaaagaacaataatgttctttcttctacattttcctaaagacatagcagttacagtttcctgctggagttatctaaaaaaggacataccaagataaattttctatcatattgaaataaaattagcataaagctttacttctgtctttgtgcttttagattggcaactgtggtcaatcagtgctgcactggaatttccaactcagcaggggaaagaa

SEQ ID NO: 2228 - DNA, 292 bp, Homo sapiens; identical to SEQ ID NO: 415
  misc_feature: n=a,t,g or c

SEQ ID NO: 2229 - DNA, 340 bp, Homo sapiens
  misc_feature: n=a,t,g or c
gtaggataacagtgttttnaatatttaagtaacaaaacattcaggttaatactcaatgcatatacaataagatagagcaacaacaacaaaattacaaagcacaatctaactatatggaggctttcaaacaattaaatagttggatagagaatgcgctaattaaaaacccagctgagccacaccgcactacctgagacctgaccagggactttctggtggtagaagggagagctcattgtgccctgtggccttcaactcaaatggatgctcttcaactcaaatccagagagcacttaacaaactccatgctctagattcgctcaaccctcctccttgcttt

SEQ ID NO: 2230 - DNA, 227 bp, Homo sapiens
tttagcattagcaattttttatttttccttttttgttgcataggaaatgcagtacttgcttccagtaattgtattgtaatgtgagaaggtggtagcactaatggttgaatacaagagttaaactaatccacaccagctcaaaaaacctgtggagatttagttgaataagaatggacgcccacagtgattctcaaccaattacaaattttcacagaacacagtaaaac

SEQ ID NO: 2231 - DNA, 255 bp, Homo sapiens
  misc_feature: n=a,t,g or c
cagacaggctatcattctttattcttatccttttgttttaaagcatttttattagtctattttttncttaaatttttaaacagctatttttaaaaacacaacaaatacacaacacaaaacttggtaaaaataactcactatatggtacatatacgcagatggtgtaatatatttatataataaaagatgaaaatagtcactttccataataaaaataagtnctatttttngtttattttacaatatacttaatat

SEQ ID NO: 2232 - DNA, 261 bp, Homo sapiens; identical to SEQ ID NO: 432
  misc_feature: n=a,t,g or c

SEQ ID NO: 2233 - DNA, 439 bp, Homo sapiens
atttttgtagttttgggcaaaacattcactgttctgtttcagcatatttccttggaacatcttcatctctttccattttgcggacactccccttcttctattctcctttactcaaaacatatggtttagacccacatcatggctttcttgtgggaagcctggatgggactaggaaaacacatgtttccaacatggtgcatatctgtttgtgcagatatcagacaagatttaatcttgtctaacttatgcgtattgttttgatgtttgcctgtggttattctgggcacagcaatggtggacattattgaaaatgaactttattggcagatgaaagataatagaacatgaagatttatgaactaccataagctctgcatctctgggtcttcatttccaaagcagcacttggaaaaccaagcccagtttcaggcaaagagtt

SEQ ID NO: 2234 - DNA, 299 bp, Homo sapiens; identical to SEQ ID NO: 481
  misc_feature: n=a,t,g or c

SEQ ID NO: 2235 - DNA, 491 bp, Homo sapiens; identical to SEQ ID NO: 329
  misc_feature: n=a,t,g or c

SEQ ID NO: 2236 - DNA, 458 bp, Homo sapiens; identical to SEQ ID NO: 314
  misc_feature: n=a,t,g or c

SEQ ID NO: 2237 - DNA, 401 bp, Homo sapiens
ttagaaatcaggtttttttttatttaatacattctaatcaaatagtaacagcagtaaataaacactttgaaaaacaggcaggtatccccctgtatctggaagaaaattaagtcaaagtattctacacagtagaagggagacaactgtttatgtccatggttagacaattcaaggacaacttggatatttctaaagccatttccaaaaaatcaatggcaacaggttgggacacagctatttcaaagggtagaatgcctatacctacattggtttttattaacggggattgagttgcacctgtatagcatgatattcttgtctttagctttaaaggaaaagagaaagtcttttccatttgcaccagtttgaaatatttctgaaataaggctcccatagaatgg

SEQ ID NO: 2238 - DNA, 275 bp, Homo sapiens; identical to SEQ ID NO: 469

SEQ ID NO: 2239 - DNA, 236 bp, Homo sapiens
tttttttttttttttttttttttttttttttatttacaaataattgtttttattaggccatttggaaaaccactaacattttttattttagaaaacattaaataataaacaagatgttatacagtactttggataacttcttccatcagtttagtgcaatgtatcattggcatcgaaaagtaaaattttcatttattttcccctttcatcttcagctgtgcagttatatgaccata

SEQ ID NO: 2240 - DNA, 378 bp, Homo sapiens
tttttttttaatgtttaccttttaaaacatccaaatgtttattttcacaagcttagtagtacaagatgcaacataattcaagaaaatcaaccacagtgctaatactttaatatattattccaaatattagacgttacagtttaaatctttttaacattagctctaatgttggaataacatttaagttaataaataactgtgaatataaccatatgttcagtctattctccccagtttatcctaaatgacaattttattgtgatttgggtcataaaagtgataaataattgtttatatgttttcataaattgcatgtttatttaattaatcctggaagaggaacctaggaaatacattccatggggttacataaattcg

SEQ ID NO: 2241 - DNA, 610 bp, Homo sapiens; identical to SEQ ID NO: 403
  misc_feature: n=a,t,g or c

SEQ ID NO: 2242 - DNA, 616 bp, Homo sapiens
  misc_feature: n=a,t,g or c
gatttccatgcactttaatgaggtccagcactcaggaggattagcgcccaccaccagctgcctgggcaggggagggccggagcaggtngcaggcgtcaggcttaggacagggaagggggctcaggatggggaagggtcctcaggacaggggaaggggctcagaagagagcagggggcttaggacaggaaggggcactcaggacggggcagggaaggtgtggggggcagtcgccacctgggtaggaagcagtggtgttttggacaggaggggctggctctccagtgacccaggtggacaccccaggcctgactcacggctttttggggacatagtggtggatccagtccaagtagtaggtgacacgggtgtagatgccaggccggttgggctgggcacagctncgntcccagctgaccacgcccgcctgtagccaggtgccattcaccttgcacaccaggggccctccagagttcgccctggcatgagtccctccggtgttcccggcacacagcatgtcgttcacggatgatgccgacgtcgtctcccgtgtaggcgccaaagtggtatttgcgtcacaaatgtggtttccattatggggaccttcactgcttcagg

SEQ ID NO: 2243 - DNA, 281 bp, Homo sapiens
  misc_feature: n=a,t,g or c
tcaggatttaaccatggtttattgcagacctattgtgtgccaggcatgagccangtgctcccacaaacagcgtctccaggtacgagaagtgtaatttcgaccctggaacaccttcctgcactcagacagaagcatgtgcagactgctctcagcaacgccacctccttcactccctggccattgggccccttctctctacctgtcccctgtcactccacttcctgccccaggncttctcttagggattttccagggctttgggggagctgctgctttcagtt

SEQ ID NO: 2244 - DNA, 2254 bp, Homo sapiens
caaccatatccaagcctttgcccgaatacatcctatctgccacacatccagcgtgaggtccctccagctacaaggtgggcaccatggcggagaagtttgactgccactactgcagggatcccttgcaggggaagaagtatgtgcaaaaggatggccaccactgctgcctgaaatgctttgacaagttctgtgccaacacctgtgtggaatgccgcaagcccatcggtgcggactccaaggaggtgcactataagaaccgcttctggcatgacacctgcttccgctgtgccaagtgccttcaacccttggccaatgagacctttgtggccaaggacaacaagatcctgtgcaacaagtgcaccactcgggaggacttccccaagtgcaaggggtgcttcaaggccattgtggcaggagatcaaaacgtggagtacaaggggaccgtctggcacaaagactgcttcacctgtagtaactgcaagcaagtcatcgggactggaagcttcttccctaagggggaggacttctactgcgtgacttgccatgagaccaagttggccaagcattgcgtgaagtgcaacaaggccatcacatctggaggaatcacttaccaggatcagccctggcatgccgattgctttgtgtgtgttacctgctctaagaagctggctgggcagcgtttcaccgctgtggaggaccagtattactgcgtggattgctacaagaacttcgtggccaagaagtgtgctggatgcaagaaccccatcactgggtttggtaaaggctccagtgtggtggcctatgaaggacaatcctggcacgactactgcttccactgcaaaaaatgctccgtgaatctggccaacaagcgctttgttttccaccaggagcaagtgtattgtcccgactgtgccaaaaagctgtaaactgacaggggctcctgtcctgtaaaagggcatttgaatctcgttctttgtgtccttactttctgccctataccatcaataggggaagagtggtccttcccttctttaaagttcctcccttccgtcttttctcccattttacagtattactcaaataagggcacacagtgatcatattagcatttagcaaaaagcaaccctgcagcaaagtgaatttctgtccggctgcaatttaaaaatgaaaacttaggtagattgactcttctgcatgtttctcatagagcagaaaagtgctaatcatttagccacttagtgatgtaagcaagaagcataggagataaaacccccactgagatgcctctcatgcctcagctgggacccaccgtgtagacacacgacatgcaagagttgcagcggctgctccaactcactgctcaccctcttctgtgagcaggaaagaaccctactgacatgcatggtttaacttcctcatcagaactctgcccttccttctgttcttttgtgctttcaaataactaacacgaacttccagaaaattaacatttgaacttagctgtaattctaaactgacctttccccgtactaacgtttggtttccccgtgtggcatgttttctgagcgttcctactttaaagcatggaacatgcaggtgatttgggaagtgtagaaagacctgagaaaacgagcctgtttcagaggaacatcgtcacaacgaatacttctggaagcttaacaaaactaaccctgctgtcctttttattgtttttaattaatatttttgttttaattgatagcaaaatagtttatgggtttggaaacttgcatgaaaatattttagccccctcagatgttcctgcagtgctgaaattcatcctacggaagtaaccgcaaaactctagagggggagttgagcaggcgccagggctgtcatcaacatggatatgacatttcacaacagtgactagttgaatcccttgtaacgtagtagttgtctgctctttgtccatgtgttaatgaggactgcaaagtcccttctgttgtgattcccaggacttttcctcaagaggaaatctggatttccacctaccgcttacctgaaatgcaggatcacctacttactgtattctacattattatatgacatagtataatgagacaatatcaaaagtaaacatgtaatgacaatacatactaacattcttgtaggagtggttagagaagctgatgcctcatttctacattctgtcattagctattatcatctaacgtttcagtgtatccttacagaaataaagcagcatatgaat

SEQ ID NO: 2245 - DNA, 424 bp, Homo sapiens
tttttattgttacagaaccattaaatacaacttatacacaagcaagctgggcggcgtccggggggcagggagagtgcaagagggtcaggggtgagcagtccgggcccggtcctggagggggctgaggctgccgtcgtgggaggggcttggctggcggaggcgggctgcctgtggaggccttgaagctttgccagcagctcctggatgaagtcctcgacaggtttcccacatgacttcaggagtccctggattttccggcttctctcctcttcactctctaactccaacaattcatcaatgttgatctcatcgggcatgtctgcctccatgccgcggtacagctcctccaggcgcccgtcgatccacttctccacgtccagccgccgctgcagctcccgccggtcatacttgacggtgacgcgcg

SEQ ID NO: 2246 - DNA, 379 bp, Homo sapiens
ttttttttttttcaactgaagaaatttatttacttttttctaggtacatagatgacataattatagacaagttttgatacataggaaaacccttccgtccacctctctttatgctaaatgaatcatcacaataatttttacaatttttaaaacaatacacagctttcttgggctgaagcaattgcaagaacatattggtactggtatattacagctacttacaatgtttttaagaacagcaatggagaaaaataagttatttaaatattgatttcatatacagaaagtgcaatgttgttagttgttatataacttgctcgacagtttcttttctctatcaattttaaatcaagataacttgggactcagactattatat

SEQ ID NO: 2247 - DNA, 2344 bp, Homo sapiens
cctccctgactgggaactcgcttggccgcaatgacctggctgatggtgtgaactcgggccagggcctgggcatcgagatcatcgggaccctccagctggtgctatgcgtgctggctactaccgaccggaggcgccgtgaccttggtggctcagccccccttgccatcggcctctctgtagcccttggacacctcctggctattgactacactggctgtgggattaaccctgctcggtcctttggctccgcggtgatcacacacaacttcagcaaccactggattttctgggtggggccattcatcgggggagccctggctgtactcatctacgacttcatcctggccccacgcagcagtgacctcacagaccgcgtgaaggtgtggaccagcggccaggtggaggagtatgacctggatgccgacgacatcaactccagggtggagatgaagcccaaatagaaggggtctggcccgggcatccacgtagggggcaggggcaggggcgggcggagggaggggaggggtgaaatccatactgtagacactctgacaagctggccaaagtcacttccccaagatctgccagacctgcatggtcaagcctcttatgggggtgtttctatctctttctttctctttctgtttcctggcctcagagcttcctggggaccaagatttaccaattcacccactcccttgaagttgtggaggaggtgaaagaaagggacccacctgctagtcgcccctcagagcatgatgggaggtgtgccagaaagtcccccctcgccccaaagttgctcaccgactcacctgcgcaagtgcctgggattctaccgtaattgctttgtgcctttgggcaggccctccttcttttcctaacatgcaccttgctcccaatggtgcttggagggggaagagatcccaggaggtgcagtggagggggcaagctttgctccttcagttctgcttgctcccaagcccctgacccgctcggacttcctgcctgaccttggaatcgtccctatatcagggcctgagtgacctccttctgcaaagtggcagggaccggcagagctctacaggcctgcagcccctaagtgcaaacacagcatgggtccagaagacgtggtctagaccagggctgctctttccacttgccctgtgttctttccccaggggcatgactgtcgccacacgcctctgtgtacatgtgtgcagagcagacaggctacaaagcagagatcgacagacagccaggtagttggaactttctgttccctctggagaggcttccctacacagggcctgctattgcagaatgaagccatttagagggtgaaggagaaatacccatgttacttctctgacttttagttggtctttccatctatcactgcattatcttgctcattcttcagttctctactccctcttgtcagtgtagacacaggtcaccattatgctggtgtatgtttatcaaagagcacttgagctgtctgaagcccaaagcctgaggacagaaagaccctgatgcaggtcagcccatggaggcagatgcccttcctgggcctgggggttttccaagccctcagctggtcctgaccaggatggagcaagctcttcccttgctcatgagctcctgatcagaggcatttgagcagctgataacctgcacaggcttgctgtatgacccctggccacagccttccctctgcattgacctggaggggagaggtcagccttgacctaatgaggtagctatagttgcagcccaaggacagttcagagatcaggatcagctttgaaggctggattctatctacataagtcctttcaattccaccagggccagagcagctccaccactgtgcacttagccatgatggcaacagaaaccaagagacacaattacgcaggtatttagaaggagagggcaaccagaaggcccttaactatcaccagtgcatcacatctgcagcactctcttctctattccctagcaggaacttctagctcatttaacagataaagaaactgaggcccacggtttcagctagacaatgatttgccaggcctagtaaccaaggccctgtctctggctactccctggaccacgaggctgattcctctcatttccagcttctcagtttctgcctgggcaatgccaggggccaggagtggggagagttgtgatggaggggagaggggtcacacccaccccctgcctggttctaggctgctgcacaccaaggccctgcatctgtctgctctgcatatatgtctctttggagttggaatttcattatatgttaagaaaataaaggaaaatgacttgtaaggtc

SEQ ID NO: 2248 - DNA, 332 bp, Homo sapiens
  misc_feature: n=a,t,g or c
aatgattttatttttaaatgtggacaggcaagcagaggtggttggcaaaggcaaggtggctgacgatccggaagctgtacaggagagataagggcactggctgccagagtgccctatcgaagcatcatccgaaccctgcggtaggggtggcccacaccacggcctgaggccagttcaatgccatatttgtgggcggcactcaggacactgcatagcgaccattgagatttgatcggtaacaggatgcataccaccaggcaccgtggacaatcactgcanagttgctgttgcttgaatcgtggtcagcgtcataggtgggtaaagggcctccc

SEQ ID NO: 2249 - DNA, 437 bp, Homo sapiens
  misc_feature: n=a,t,g or c
ttttgcaaaaaaccatccatttatacagtttgtggttcagaagcaacaatatgcacaacggtggaacagtctgtgctgtccccaccccacctgaactcgccagttcctgtctcccaaggggcacagaacacaggccccctgcctggcagacccgacttagttacaggcccctgggaggnggnaacttagcgggtcgaggccaggagggaggaggaccagcacctgatgcccctggggccncgctgggtcatggaactgtgtgtgtggangggtggggggtcagcccaccacgggccatttctccccaaggctaagggcgggggaacaagtaaagctgaggagagggcttcatgggacagggttcccatcccctgctggganggtgttcctggataccccacaaggcacttacagatgcaaactttangcgagtnccc

SEQ ID NO: 2250 - DNA, 514 bp, Homo sapiens
  misc_feature: n=a,t,g or c
gatcgccagagcccaggagtttgaggctgcagtgagctatgagggtgcctctttgctccatcctaggcaacagagtgagacgctgtttaaaaaggaaaaaatccttccntagagctagtatcctaaagctgcagagctagcccatgacctcattggtttcnttgtccttggggtgcttttcctgaatctttgggggtgaagggagtnttgctcccagtccagaggcctgattcttttcggactgggttctcaagacacgaccaggttctcaagacacgagtccccttnttcctncccattaaagggggtttntnagaagcaagancagcccctttccccaagtcacagcctgaagggaggccccngagangcttccctcctttccccncaccctgnttccttaaccttnttttgnccctgntttttttaggaanctggnagtttcaattngtttttaangggggattgggggggaagggaagncttngggggacaaaaaanntttttnttncaa

SEQ ID NO: 2251 - DNA, 538 bp, Homo sapiens
tttttttttttttttttttttttctccaaagtaagtttttattacaaaaacctttactacaattcaatgttttattaagactaaagtcaggaccttgccaacttactgagtcataaggaaacacatgaggaaagtcaacatggtctctaggctgacttgaattattccttgactaagaattctagggttatgtggacttttctgttaacatcctgacttagttcctttctttagcagcaaaaaaaacagcagaaataaaattcttggcaggctgctctacagaataaagtgaacaataggaaatatggatatgaagtgcagaagcagcaagttaccacaagatggggctatacactcaagaaagaacagttggttagcgaagtttctctattatcaaaaaaatttaaaaatactttgagtttatttgatgccttcatctttacagcccagctaagcaatcccataaaaatgaggcactgactaatgttttacaagcccctcagtctcctccagagagtggaggattattaggataggc

SEQ ID NO: 2252 - DNA, 372 bp, Homo sapiens; identical to SEQ ID NO: 392
  misc_feature: n=a,t,g or c

SEQ ID NO: 2253 - DNA, 363 bp, Homo sapiens
ttttttttttttttttttttttttttttttttttttaagacttaacgtcattgtatttattaggttctgaaacaatacacattcacatccttttgaatacagtacatttggcacaataagcgcttgctttacaatgaaataacactaatgaatggcaagagattaaaattacatccagaaaggaaaaaaatgtacaaataaagcatcacaatacaaaaaaaaaaaaatcctaaaattgaatacattttacagttagccagaattattttgcacataatttaaaaagaggtaattttttagccttcttttttttttttaaagcaagaatgcattgttttttcacctttggaggaaaaaaaatta

SEQ ID NO: 2254 - DNA, 233 bp, Homo sapiens
  misc_feature: n=a,t,g or c
natgaacagtatataatctaatctctttaattttatgtacatgaatataatgtatgtcaactttgtacatgagatacatatagtatttaaacattttactcaacaaacaagaatttacaatagcaatataactgactagagggctatcaacttaataatacttagattagatctgtactttaataggaaaagaatttaatagtttacaatcatagaaacactgacatttaaaa

SEQ ID NO: 2255 - DNA, 286 bp, Homo sapiens
  misc_feature: n=a,t,g or c
ctaaaaaggactattatcagtttccaaatacaatacttctctcttctggtttttcctgaatgagcctgattttgttgctggttttcatcatctatgagggtaaaacgagtacccttaaaatccctgtggccagtttgaacacccctgttgtattcttttctctgttcagtgtgtcagctattttgtgaagatgcttagatgtatagttttnataaccacagttttaaatctttaatctgtgcataataaaaagatatatatcagttaaaaaaaaaaaaaaaaaaaa

SEQ ID NO: 2256 - DNA, 6360 bp, Homo sapiens
ctgggccacgtgccccggaagcttgctgcctgacgctgtcctcagcagtcccctgtctcatcgcagcaaaaggagcctatcctgtcggccccacatggtcaagctggtgtgtcccgctgacaacctgcgggctgaagggctcgagtgtgccaaaacgtgccagaactatgacctggagtgcatgagcatgggctctgtctctggctgcctctgccccccgggcatggtccggcatgagaacagatgtgtggccctggaaaggtgtccctgcttccatcagggcaaggagtatgcccctggagaaacagtgaagattggctgcaacacttgtgtctgtcgggaccggaagtggaactgcacagaccatgtgtgtgatgccacgtgctccacgatcggcatggcccactacctcaccttcgacgggctcaaatacctgttccccggggagtgccagtacgttctggtgcaggattactgcggcagtaaccctgggacctttcggatcctagtggggaataagggatgcagccacccctcagtgaaatgcaagaaacgggtcaccatcctggtggagggaggagagattgagctgtttgacggggaggtgaatgtgaagaggcccatgaaggatgagactcactttgaggtggtggagtctggccggtacatcattctgctgctgggcaaagccctctccgtggtctgggaccgccacctgagcatctccgtggtcctgaagcagacataccaggagaaagtgtgtggcctgtgtgggaattttgatggcatccagaacaatgacctcaccagcagcaacctccaagtggaggaagaccctgtggactttgggaactcctggaaagtgagctcgcagtgtgctgacaccagaaaagtgcctctggactcatcccctgccacctgccataacaacatcatgaagcagacgatggtggattcctcctgtagaatccttaccagtgacgtcttccaggactgcaacaagctggtggaccccgagccatatctggatgtctgcatttacgacacctgctcctgtgagtccattggggactgcgcctgcttctgcgacaccattgctgcctatgcccacgtgtgtgcccagcatggcaaggtggtgacctggaggacggccacattgtgcccccagagctgcgaggagaggaatctccgggagaacgggtatgagtgtgagtggcgctataatagctgtgcacctgcctgtcaagtcacgtgtcagcaccctgagccactggcctgccctgtgcagtgtgtggagggctgccatgcccactgccctccagggaaaatcctggatgagcttttgcagacctgcgttgaccctgaagactgtccagtgtgtgaggtggctggccggcgttttgcctcaggaaagaaagtcaccttgaatcccagtgaccctgagcactgccagatttgccactgtgatgttgtcaacctcacctgtgaagcctgccaggagccgggaggcctggtggtgcctcccacagatgccccggtgagccccaccactctgtatgtggaggacatctcggaaccgccgttgcacgatttctactgcagcaggctactggacctggtcttcctgctggatggctcctccaggctgtccgaggctgagtttgaagtgctgaaggcctttgtggtggacatgatggagcggctgcgcatctcccagaagtgggtccgcgtggccgtggtggagtaccacgacggctcccacgcctacatcgggctcaaggaccggaagcgaccgtcagagctgcggcgcattgccagccaggtgaagtatgcgggcagccaggtggcctccaccagcgaggtcttgaaatacacactgttccaaatcttcagcaagatcgaccgccctgaagcctcccgcatcgccctgctcctgatggccagccaggagccccaacggatgtcccggaactttgtccgctacgtccagggcctgaagaagaagaaggtcattgtgatcccggtgggcattgggccccatgccaacctcaagcagatccgcctcatcgagaagcaggcccctgagaacaaggccttcgtgctgagcagtgtggatgagctggagcagcaaagggacgagatcgttagctacctctgtgaccttgcccctgaagcccctcctcctactctgccccccgacatggcacaagtcactgtgggcccggggctcttgggggtttcgaccctggggcccaagaggaactccatggttctggatgtggcgttcgtcctggaaggatcggacaaaattggtgaagccgacttcaacaggagcaaggagttcatggaggaggtgattcagcggatggatgtgggccaggacagcatccacgtcacggtgctgcagtactcctacatggtgaccgtggagtaccccttcagcgaggcacagtccaaaggggacatcctgcagcgggtgcgagagatccgctaccagggcggcaacaggaccaacactgggctggccctgcggtacctctctgaccacagcttcttggtcagccagggtgaccgggagcaggcgcccaacctggtctacatggtcaccggaaatcctgcctctgatgagatcaagaggctgcctggagacatccaggtggtgcccattggagtgggccctaatgccaacgtgcaggagctggagaggattggctggcccaatgcccctatcctcatccaggactttgagacgctcccccgagaggctcctgacctggtgctgcagaggtgctgctccggagaggggctgcagatccccaccctctccccagcacctgactgcagccagcccctggacgtgatccttctcctggatggctcctccagtttcccagcttcttattttgatgaaatgaagagtttcgccaaggctttcatttcaaaagccaatatagggcctcgtctcactcaggtgtcagtgctgcagtatggaagcatcaccaccattgacgtgccatggaacgtggtcccggagaaagcccatttgctgagccttgtggacgtcatgcagcgggagggaggccccagccaaatcggggatgccttgggctttgctgtgcgatacttgacttcagaaatgcatggtgccaggccgggagcctcaaaggcggtggtcatcctggtcacggacgtctctgtggattcagtggatgcagcagctgatgccgccaggtccaacagagtgacagtgttccctattggaattggagatcgctacgatgcagcccagctacggatcttggcaggcccagcaggcgactccaacgtggtgaagctccagcgaatcgaagacctccctaccatggtcaccttgggcaattccttcctccacaaactgtgctctggatttgttaggatttgcatggatgaggatgggaatgagaagaggcccggggacgtctggaccttgccagaccagtgccacaccgtgacttgccagccagatggccagaccttgctgaagagtcatcgggtcaactgtgaccgggggctgaggccttcgtgccctaacagccagtcccctgttaaagtggaagagacctgtggctgccgctggacctgcccctgcgtgtgcacaggcagctccactcggcacatcgtgacctttgatgggcagaatttcaagctgactggcagctgttcttatgtcctatttcaaaacaaggagcaggacctggaggtgattctccataatggtgcctgcagccctggagcaaggcagggctgcatgaaatccatcgaggtgaagcacagtgccctctccgtcgagctgcacagtgacatggaggtgacggtgaatgggagactggtctctgttccttacgtgggtgggaacatggaagtcaacgtttatggtgccatcatgcatgaggtcagattcaatcaccttggtcacatcttcacattcactccacaaaacaatgagttccaactgcagctcagccccaagacttttgcttcaaagacgtatggtctgtgtgggatctgtgatgagaacggagccaatgacttcatgctgagggatggcacagtcaccacagactggaaaacacttgttcaggaatggactgtgcagcggccaggacagacgtgccagcccatcctggaggagcagtgtcttgtccccgacagctcccactgccaggtcctcctcttaccactgtttgctgaatgccacaaggtcctggctccagccacattctatgccatctgccagcaggacagttcgcaccaggagcaagtgtgtgaggtgatcgcctcttatgcccacctctgtcggaccaacggggtctgcgttgactggaggacacctgatttctgtgctatgtcatgcccaccatctctggtctacaaccactgtgagcatggctgtccccggcactgtgatggcaacgtgagctcctgtggggaccatccctccgaaggctgtttctgccctccagataaagtcatgttggaaggcagctgtgtccctgaagaggcctgcactcagtgcattggtgaggatggagtccagcaccagttcctggaagcctgggtcccggaccaccagccctgtcagatctgcacatgcctcagcgggcggaaggtcaactgcacaacgcagccctgccccacggccaaagctcccacgtgtggcctgtgtgaagtagcccgcctccgccagaatgcagaccagtgctgccccgagtatgagtgtgtgtgtgacccagtgagctgtgacctgcccccagtgcctcactgtgaacgtggcctccagcccacactgaccaaccctggcgagtgcagacccaacttcacctgcgcctgcaggaaggaggagtgcaaaagagtgtccccaccctcctgccccccgcaccgtttgcccacccttcggaagacccagtgctgtgatgagtatgagtgtgcctgcaactgtgtcaactccacagtgagctgtccccttgggtacttggcctcaaccgccaccaatgactgtggctgtaccacaaccacctgccttcccgacaaggtgtgtgtccaccgaagcaccatctaccctgtgggccagttctgggaggagggctgcgatgtgtgcacctgcaccgacatggaggatgccgtgatgggcctccgcgtggcccagtgctcccagaagccctgtgaggacagctgtcggtcgggcttcacttacgttctgcatgaaggcgagtgctgtggaaggtgcctgccatctgcctgtgaggtggtgactggctcaccgcggggggactcccagtcttcctggaagagtgtcggctcccagtgggcctccccggagaacccctgcctcatcaatgagtgtgtccgagtgaaggaggaggtctttatacaacaaaggaacgtctcctgcccccagctggaggtccctgtctgcccctcgggctttcagctgagctgtaagacctcagcgtgctgcccaagctgtcgctgtgagcgcatggaggcctgcatgctcaatggcactgtcattgggcccgggaagactgtgatgatcgatgtgtgcacgacctgccgctgcatggtgcaggtgggggtcatctctggattcaagctggagtgcaggaagaccacctgcaacccctgccccctgggttacaaggaagaaaataacacaggtgaatgttgtgggagatgtttgcctacggcttgcaccattcagctaagaggaggacagatcatgacactgaagcgtgatgagacgctccaggatggctgtgatactcacttctgcaaggtcaatgagagaggagagtacttctgggagaagagggtcacaggctgcccaccctttgatgaacacaagtgtctggctgagggaggtaaaattatgaaaattccaggcacctgctgtgacacatgtgaggagcctgagtgcaacgacatcactgccaggctgcagtatgtcaaggtgggaagctgtaagtctgaagtagaggtggatatccactactgccagggcaaatgtgccagcaaagccatgtactccattgacatcaacgatgtgcaggaccagtgctcctgctgctctccgacacggacggagcccatgcaggtggccctgcactgcaccaatggctctgttgtgtaccatgaggttctcaatgccatggagtgcaaatgctcccccaggaagtgcagcaagtgaggctgctgcagctgcatgggtgcctgctgctgcctgccttggcctgatggccaggccagagtgctgccagtcctctgcatgttctgctcttgtgcccttctgagcccacaataaaggctgagctcttatcttgc

SEQ ID NO: 2257 - DNA, 62944 bp, Homo sapiens
gatcctatttctaaggagtaagataataatataacagccggccgggcacagtggctcacgcctgtaatcccagcactttgggaggccgaggcaggcggatcacctgaggtcgggcattcgagaccagcctgacaaacatggagaaaccctgtctctactaaaaatacaaattagctgggcgtggtggtgcatggctgtaatcccagctattgggaaggctgaggcaggagaattgcttgaacccgggaggcagaggttgcaatgagctgagattgcaccattgcactccagcctggacaacaagagcgaaactctgtctcaaaaataataataataataatataatagcattctattaactgtttagtcttctaggacttgcactgtaatgccacagtccatcaggttgttgcacacagctgtgcttcatccattttcaacagaatgtaatatgtcattgtgtgaaattaccacaggacatggtttcaacatccacaaaatgattaacttgatgctctctgaggcgccttttagatatgagaatctaggaccctctgcaccgtcttaacccaagagtttgcttgatggagagcgggaagaataatgcaagttgcatctccaatatctcccctcccctccacagggttttgaaggccccacctgcagccacagggccccttcctgcggcttccatcactgccaccacggaggcctgtgtctgccctcccctaagccaggcttcccaccacgctgtgcctgcctcagtggctatgggggtcctgactgcctgaccccaccagctcctaaaggctgtggccctccctccccatgcctatacaatggcagctgctcagagaccacgggcttggggggcccaggctttcgatgctcctgccctcacagctctccagggccccggtgtcagaaacccggagccaaggggtgtgagggcagaagtggagatggggcctgcgatgctggctgcagtggcccgggaggaaactgggatggaggggactgctctctgggagtcccagacccctggaagggctgcccctcccactctcggtgctggcttctcttccgggacgggcagtgccacccacagtgtgactctgaagagtgtctgtttgatggctacgactgtgagacccctccagcctgcacgtgagcctgaaatccactggagccagggaaggagaggggtgggtgagaggaggaggaaggacgtagatggctctgagttacagtgtggccacagccttgggctccagggagtttccaccctaataaccatcactaaacaggggtcgaagactctggactccaacctagggtaatggggtggcatcagtatttaatgtggggcgtggcctttgggctcctctctaagagttgaaggaactcaggtctcaagcctccttccctaagccttgctgccatggagtatttcccctagcagtcagcacctcacagagggaaaagggcctgggactctcctttagaaacagaggagagcttgggagggtacagagaggggacagtctagggagacaggggtgttagcagacattggggtgtctggactaccatccaggacttgactaagctcattgctccacagctgcccccacttagcaaccaaagccctagagggcacaaaatatggggaattctttctagggtgaagaaaagagtcaggttttagggaggtcctgagtccccctctccttaccccacagtccagcctatgaccagtactgccatgatcacttccacaacgggcactgtgagaaaggctgcaacactgcagagtgtggctgggatggaggtgactgcaggcctgaagatggggacccagagtgggggccctccctggccctgctggtggtactgagccccccagccctagaccagcagctgtttgccctggcccgggtgctgtccctgactctgagggtaggactctgggtaaggaaggatcgtgatggcagggacatggtgtacccctatcctggggcccgggctgaagaaaagctaggaggaactcgggaccccacctatcaggagagagcagcccctcaaacacagcccctgggcaaggagaccgactccctcagtgctgggtaagaagctaggtggagggaagggccagacaccagtttttttaagagggcagagggaggaaagggagccagggaccaatacagaggtctctgaggtgcctcctctacaggtttgtggtggtcatgggtgtggatttgtcccgctgtggccctgaccacccggcatcccgctgtccctgggaccctgggcttctactccgcttccttgctgcgatggctgcagtgggagccctggagcccctgctgcctggaccactgctggctgtccaccctcatgcagggaccggtaggtgaccccttgccactttctctgacctctgttcccaggccagctctcatgctagcaacaggcaatggaggctgaatcaaacaggacagctgagactgaaaatgttctttgtggggacttactttccctaaccccgctttctctaactgaatctcccactggcccatttgttctacagtctccttccttatttccctaagcacattatcctaacctctgtcatagccctccaacaaagggatggtttatcttctctaccagactgagaatacctaatagtctttgtatcagacaattcatagtacatgaaagaataataggctgggcgcagtggctcatgcctataatcccagcacgttgggagaccaaggcaggtggatcacgaggtcaggagattgagaccatcctggctaatgcggtgaaaccctgtctctactaaaaataaaaaaattagccggctgtggtggcgggtgcttgtagtctcagctactcaggaggctgaggcaggagaatggcgtgaacctgggaggtggagcttgcagtgagccgagatcgcgccactgcactccagcctgggcgacagagggagactccatctcaaaaaaaaaaaaagaaaaataactgctatatcgtactttgtgccttactctaagcattttacattgttacctcatttaatcctcccccacaaccccatgaggcacgtactgctggttgagtatcccttatctgaaatgcttgggaacaaaagtgtttcagatttcggatttattttggaatatttgcattatacttactggttcagcatccctaatacaacatccaaatgctacaatgagcatttcctttgagcgttatgttggtactctaaaagtttcagactttggaacatttcagatttgggattggggttatggatactcagcctttttttgtgtgtttgttttctgagacagtcttactctgtcagccacactggagtacagtgacgccatctcagctcactgcaacctctgcctcctgggtttaagcaattctcttgcttcagactactgagtagctggaattacaatggcatgccaccatgccctgataattttttttgtttttgttttgttttgttttgtttgagacagagtcttgccttgtcgcccaggccggagtgcagtggcgcgatctcggctcactgcaagctccacctcccaagttcacgccattctcctgcctcagcctcccaagtagctgggactacaggtgcccgccaccacacctggctaattttttgtatttttagtagagacagggtttcaccatgttagccaggatggtctcgatctcctgacctcatgatccacctgcctcagcctcccaaagtgctgagattataggagtaagccactacacccagccactaatttttatatttttagtagagagggggttttgccatgttggccaggctggtctcgaactcctggcctcatatgatccacctgcctcagcttcccaaagtgctgggattacaggcatgagccactgtgcccaacctcaatctatattatcatccccattttgcagataaggaaaccgaggcaaagacaggctactaaacttgtccaaaggtctcccaatagtaatcagtctcaccaggagtggcctctctttgtgactctgtctctcccaccagcaccccctgccaaccagcttccctggcctgtgctgtgctccccagtggccggggtgattctcctggccctaggggctcttctcgtcctccagctcatccggcgtcgacgccgagagcatggagctctctggctgccccctggtttcactcgacggcctcggactcagtcagctccccaccgacgccggcccccactaggcgaggacagcattggtctcaagtgagaatgaggagaaacccaggctcaggaaggggagtctctcctatggcgatatttacaatcagaaaagataagaaatactattgcagaagtcaaagataggggaaggagagaggggtgggaagcctgctggaaattttggagaccctgatggtcataattccgtgtaacctctacccacccattcctttccagggcactgaagccaaaggcagaagttgatgaggatggagttgtgatgtgctcaggccctgaggagggagaggaggtgggccaggtgaaagggctggggcaagaatggtctggaggtgatggaagggatgaaagggcaaatcaaccttcactgatccttgctgttacccaaaggctgaagaaacaggcccaccctccacgtgccagctctggtctctgagtggtggctgtggggcgctccctcaggcagccatgctaactcctccccaggaatctgagatggaagcccctgacctggacacccgtggacctggtatgtgagtcaacccagaccaagaaaaaaaaaaaaagtcctttgaccctattagaatcagagagtcctttaatatcagaactagaggaaataattttagactgagtgccttagaacaatgattctcaaagtgtggtcctcagacagcaaaatcagcatcacctgggaatttgtcagaaatgcaaattattgggctccactacagagctactgactcaggaatttaaaatgttaggcaatctgttttaacaagcccttcaggtgaatctgatccagactcgtttgagaaaaccactgctaggccgggcgtggtggctcacgcctgtaatcccagcactttgggaggccaaggcgggtggatcacaaggtcaggagatcgagaccatcctggctaacacagtgaaaccccgtctctactaaaaatacaaaaaattagccgggcgtggtggcgggagcctgtagtcccagctgctctggaggctaaggcaggagaatggcgtgaacctgggaggaggagcttgcagtgagccgagatcgcgccactgcactccagcctgggtgacagggcgagactccgtctcagaaaaaaaaaaaaaaaaaagagaaaaccactgccctggaatgtcagagaattaagctgcaggttccttttacagaggaagaaactgaagtcagagaaaagcagaaaagtcacttggctaaagccacacagagccagaacttagcttcccaacacctcaggttttgattctctctgagcttacatgttgtcccttcccccttgttgtgtcctttagattgacccattactctgtcttaccaacagatggggtgacacccctgatgtcagcagtttgctgtggggaagtacagtccgggaccttccaaggggcatggttgggatgtcctgagccctgggaacctctgctggatggaggggcctgtccccaggctcacaccgtgggcactggggagacccccctgcacctggctgcccgattctcccggccaaccgctgcccgccgcctccttgaggctggagccaaccccaaccagccagaccgggcagggcgcacaccccttcatgctgctgtggctgctgatgctcgggaggtctgccaggttagcacacactgaggtccctacagggaatggggcgagcttacaagtaaagctggacagaagcatcccctagagtttgacaaggaggaaattggtgtgattgggaacctgacagggaaactgcggaggatggctgaatatggattgcgagtggggttaatagtgtaaggaactcgagttggcagtccaaggtaccccaggggtcactggccctctgtctccccagcttctgctccgtagcagacaaactgcagtggacgctcgcacagaggacgggaccacacccttgatgctggctgccaggctggcggtggaagacctggttgaagaactgattgcagcccaagcagacgtgggggccagagataaatggggtatgtagaggaaggggtgatgtatgctatagagaagttgagcagatggggtgggagatagcgtgcaaaatataggtgcagcagaggggcattccctctcatcctgctgttacggcggtcaatctgagatgcggtggaagtacgggccgcgtgagtttccccccccaactcccaccctcaacaccacactggccctccgctccagcttactggggaactggcatggaacacagtgtctgtggaaaggggggggaatctcgtggggggagactgtctcccggtctcaccgaccccagaacaatgccccattgtccctcccgcgcactggtgacgtcaccagggcaacacttcctgcaggccggtggtctcctgggcaacgcttcccgcctttgagggaccagccggcccgaatagcccttcccccaaggccagaacccgtgggaaaccggaacccaggcgtctggcccccaactggggtaacaacctcccacgtcgtcccctagggaaaactgcgctgcactgggctgctgccgtgaacaacgcccgagccgcccgctcgcttctccaggccggagccgataaagatgcccaggacaacagggttagatgggacagagggcttcccacaaaacagtcaggcgcacgagagatggaaagtgcggtaacccgcaaagcctgaagggataggggccagtggtcgcgcaagtgaaggcagaaaggcccagtcctgtgggcgtggccttccctgatatcggccctggctcttctgtacaggagcagacgccgctattcctggcggcgcgggaaggagcggtggaagtagcccagctactgctggggctgggggcagcccgagagctgcgggaccaggctgggctagcgccggcggacgtcgctcaccaacgtaaccactgggatctgctgacgctgctggaaggggctgggccaccagaggcccgtcacaaagccacgccgggccgcgaggctgggcccttcccgcgcgcacggacggtgtcagtaagcgtgcccccgcatgggggcggggctctgccgcgctgccggacgctgtcagccggagcaggccctcgtgggggcggagcttgtctgcaggctcggacttggtccgtagacttggctgcgcgggggggcggggcctattctcattgccggagcctctcgggagtaggagcaggaggaggcccgacccctcgcggccgtaggttttctgcaggcatgcgcgggcctcggcccaaccctgcgataatgcgaggaagatacggagtggctgccgggcgcggaggcagggtctcaacggatgactggccctgtgattgggtggccctgggagcttgcggttctgcctccaacattccgatcccgcctccttgccttactccgtccccggagcggggatcacctcaacttgactgtggtcccccagccctccaagaaatgcccataaaccaaggaggagagggtaaaaaatagaagaatacatggtagggaggaattccaaaaatgattacccattaaaaggcaggctggaaggccttcctggttttaagatggatcccccaaaatgaagggttgtgagtttagtttctctcctaaaatgaatgtatgcccaccagagcagacatcttccacgtggagaagctgcagctctggaaagagggtttaagatgctaggatgaggcaggcccagtcctcctccagaaaataagacaggccacaggagggcagagtggagtggaaatacccctaagttggaaccaagaattgcaggcatatgggatgtaagatgttctttcctatatatggtttccaaagggtgcccctatgatccattgtccccactgcccacaaatggctgacaaatatttattgggcacctactatgtgccaggcactgtgtaggtgctgaaaagtggccaagggccacccccgctgatgactccttgcattccctcccctcacaacaaagaactccactgtggggatgaagcgcttcttctagccactgctatcgctatttaagaaccctaaatctgtcacccataataaagctgatttgaagtgttacctttttttggaggaattggggagaagaatgggaaaaaagatgggagtgactgcataatgtcagcattttgtgcttttggctcagcatttggattggatggaggatgtaagtatagtttaaaagcaagaataagtatatttaggggccctatgataatttagggtattatctgaaagcaagaatctagtagccaagggagaaaccgcacacactaggtcaggggtccccaacccttgggccacagactggtactggtccatggcctcttaggaactgggccacacagcaggaggtgagcaagcattactgcccaagctccacctcctgtcagatcagcataagcattaaattctcataggaactcgaaccctattgtgaactgtgcatgcaagggatctaagtttctcgcttcttacgggaatctaatgcctaatgatctggggtggaacagtttcatcctgaaaccagccctccgtcgccaccgaccatggaataattgtcttccacgaaactcttccctggtgccaaaaaggtaggagaccactgcactagatgatgcacacactttgtccctcatcctagggcttttacttatggccacttaggagattcctaaggccacaagtcaagtagatggagagagtatcttgaaactttgtccaccttgcagcaatatgttgctaggtttgaaacatggagtcatgaggcattttgaaagccaataatatctacagtttattaagtattcactatgcatcaagtgctttattacattattaatacatcaaccctatgaagtaggtgctattaaaaccctatttcactcagaaattgaggcacagagatctgcccaagattgcaaggaataagcggcaggaccagatctcttcatcacatttcacattccaaatcactcagctataaactccctaacatgacaggttgccatttagaggtaccaaatggttgtctgccctgctccttccttgatgccaaccagcctgattagcattgatcaaagaccaagccagagaggtagtcctctcccttttcaatttcatttcatttctttctttttctgaaacagggtattgctctgttgcccagcctggagtgcagtggcacaaatggctcactgcagccacaacctcctgggctcaagcaatcttcctacctcagcctctcatttttccatatctatatctcttatgcccaaaataaactttcccctgccccttgtctgcactaaactgtaagtttccaaaatgaacccttcccgtactctatttggtacacatcttgtctcctgaatagagtgtattttttattttattttattttggagacggagtctcgctctgtcacctaggctggagcgcagtggcacaatctcagttcaccgcaacctccgcctcccgggttcaagcaattctcctgcctcaacctcctgagtagctgggattacaggcgcatgtggccacgcccagctaattttttgtattttagtaaagatggggtttcaccatgttccccaggctggtctccaactcctgagctcaggcaatccacccgcctcagcctcccaaagtgctaggattacaggtgtgagccaccgcagccggccatctcctgaatagattttaaatacctagaggtcagggatgattattcaatacatatatattgaatacttactatgtgttggacccggtgctagggttttatgtatatatttgagagctccacatccctggatctgaatcctccacttcccactggaaccatgcccctcccagtcccggtaagtaagagggaagatcgggagggccaaatcctacaccagggtctatcttagggagggaagggacctggctggggggagggggattctgaggagtgaaaccacttcctgtgtagctagttcctgtgttgacagaaagagcagaagaggaggtggggtggagggagcagagccagggattaggggactactgaggctctggagatgagaccgccaggagtccttccccaccatgagccccctccactcctgcagctggaggagtttttcccagtctcagtgctgccctggggcgagagagactgaacaagctgtttgggtgggaagagaatggaggaagttgacagggatgggcggggcccgtgggggggctgaccaggaacccagcttcctgctcagtacccaggcatccagcccccagctcacccccaccccttccagcccccactcccctcaggaacccaaggttccagccctcctcccaaatcccagccacccctcccccaccagtttctcccctctaggggatggaggctgagagaccccaggaagaagaggatggtgagcaggtgagctgggcacggggttggggaggctgacactgggaaagaagggaggtgagaggacctggggcagaaatgtagggacacaggggccttgaaaggcttgggcaaactgaggcaggaacagagacacacagagaggaaacgggccactggcctagccccctgtccactcctcccgcttcaaccaccactgcttgactagaatggacatattttggcatcagggcccccctcaggatgaggaaggctggccccctccaaactccaccactcggccttggcgatctgctcctccatcccctcctcctccagggacccgccacacaggtacccctacccacccagggagagccccgaccctagtgcccacatcctgaccccattaccaaggcccactccattgtgggccctctccccacctcctccagactccccttgggattccccattgcaccccctctcctctgatccaaagtccctaatcacgtcaccctgtccacactcccccacggctcctgtctgccaacctctctgggtctctgagccctccacacccctctccccagccctgggaccccgctcggcctccctgctctccctgcagactgaactccttctggacctggtggctgaagcccagtcccgccgcctggaggagcagagggccaccttctacaccccccaaaacccctcaagcctagcccctgccccactccgtcctctcgaggacagagaacagctttacagcactatcctcagtcaccaggtaagacatccccccaggaggcaaacccaggcctcctggtctcttggcccctgttctctttggggctctactcctgtttctccctaggcaccccatcgccttcacaggtttcctatatgcctccccataccaacccttgatcctctcaagaacctcctcctctcagaccctcaccaaagctctccctctccctccactcctccagtgccagcggatggaagcccagcggtcagagcctcccctccctccaggggggcaagagctcctggagttgctgctgagagttcagggtgggggtcgaatggaggagcaaaggtcccggccccccacacacacctgctgagacttgagccccaaccagcccttccttgccactggtctcaaagctgggcagcccattgcatgccctcaactcttgcttggcaggggtaccagagactgaaagacacggcacaaatctcaatattcatctcccacatcaccttccctgggaactggacagggtgaaagtcctcaaactctgggaacaggcgagatggaacagggatttaactccccgcccacaggtccatgggagcttgaggcagtaagggggatcccaggcacccatctcaaggagtggctgggagtcttttccctaacttgtggggacaccaccagttgtcaagctactaggcagtagggtctgagggctcaggcctccacctgagaggttataacctgagagacagctctacccttcctcccagtaagaagggaaggtgggtgggcacctgagagattaagactattctcccagtcccactaccagcacccccgatccctgagactgaggggtttacgggctgtgaatggaccttcagccctgcccaccctccctccccactgctgctgagtctgtctgatgttttggttgtgtgaataaatataattcccctctggactgcagactggtatctggggggcccaggcggggtgaaaggtaggaaggtgaggccagaggccttttctctccccagtctggccagaggccagctcccctccccggctggttaattactggctcattaagcagcggctggagacctccctaattatctcccccagcccccctcttcggttttaattaagtagaacagggaggggagtcattagaacaagaaatacgaactgagctgccggtgaacccaggcattccagcggcctgagtccacatcgcttagatccctgattcaggacccaggtgacagacgcccccagccgccaacacagccccactcctaggccgcggaagtccagccagggggctttcccatatctttcagatggcccgtctcctcccctcatcccctcttccctctcccctcctccactaggtctcagttcctctgtttctgtgtctctctctccgcccccagctcctccctgttcctcctctcttctcccctcctcttcctctccggctcccctcccccagcctccctccctcgctccccccccttctccctcctccctcctccctctctctcacacacacccccgcttgggcctcctctctctctccggctccattttctccgccgccgggggccggggtctcctgtggggggcccagccggtatcccaggtctcccttcagtgccggggtgaacccccgggggagccgggagccgggggcagacgggcgggggttggggcggagggagcagcggccccagcgagtttggggggagaagtaaccaggcggggggaggggcggagcagggagggggcctcagggcccccccccagctatggacgaacggctactggggccgccccctccaggcgggggccgggggggcctgggattggtgagtggggagcctgggggccctggcgagcctcccggtggcggagaccccggtgggggtagcgggggggtcccgggaggccgagggaagcaagacatcggggacattctgcagcagataatgaccatcaccgaccagagcctggacgaggcccaggccaagtgagtgcccccactccgggaccccacacagacccagcaaaccccgttcacatgttctgaatcttctgggagccccccccaactccagggccctctccaggatccaacagctctcttctctccttattcctgggagcccatagaaaagtgatccctctcaaacctcccttcacccccaggccctgaaaccttcacagagggaacccccggtggcccggctccccactcctaaccttttgccgacccctgcagtctcctggaacagccccatccccgggagccccctctggctcccagactaagaaactgttcttgggctacgttatcttctcccctaactctccacccagccccctcattctctccagatgtggagacctccacaccctctccagagcccctaaagctcctctccactgctcagccagacactaggtgcatcaaagcctcccacctgctcagccccaggaccccttcacacaccctacactgatctccccagttagctcggcacccccagccccactctgccacctcaaactctgactcttctcaaccccagcttctgtctctctccctctgaaacctaccaagtcactttcctttctccatccactcccagattcctcctcctacctttctagaccatctcccaaagcccgcagcctttaacctgctgcctgcatcttccctgtgtctccctgaagctgaggagcttccccatgctctgggagctgatcttttcccaagaactcctcattccacccccaactcattccacccccaatccgcttcctccctccgcagactgaccctcctccctccttgttctcaggccccctgctctgtttctctagctcctcaacttttctctttccccactcccactcctcccaaggaaacacgccctaaactgccaccgaatgaagcctgctctctttagcgtcctgtgtgaaatcaaggagaaaactggtatgtgggccccccccggattgctcaactctgggaacagaaccctgttcattatagggctagagtgtgacaacttggggccctgaggaaagtaaggagtcagggggactggggaaggaaccaaagcctgggaacttggctctccaggaagcaccaggaggactgagcactgggtattggggtctctgggtccctaagtccactcgcctgcatgctaggcctcagcattcggagctcccaggaggaggagccggtggacccacagctgatgcgcttggacaacatgcttctggcagagggtgtggctgggcccgagaaagggggcggctcagcagcagcagctgcagccgctgcagcctctggtggtggtgtgtcccctgacaactccatcgaacactcggactatcgcagcaaacttgcccagatccgtcacatataccactcggagctggagaagtatgagcaggtaaggagaggaggcttgggtgggtggagggaagggctcttgcaggggaatcccatggtcaaagggctcctcctcaccagcccactggcccccactacaggcatgtaatgagttcacgacccatgtcatgaacctgctgagggagcagagccgcaccaggcccgtggcccccaaagagatggaacgcatggtgagcatcatccatcgaaagttcagcgccatccagatgcagctgaagcagagcacctgcgaggctgtgatgatcctgcgctcccgtttcctggatgccaggtgggcccagggaccccaggctggcccccagcactgggctccttcccattcctctccaagaccctgagctgccatgctgcacaacatggtactccatgacaatggtgactctggggtcatgccatgtgacagccctgccaggacatcaacatcctcctcaccgctcttctccctcctctgtagacgaaagcgccgtaacttcagcaaacaggccactgaggtcctaaatgagtatttctactcccacctgagtaacccatatcctagtgaggaggccaaggaggagcttgccaagaagtgtggcatcaccgtgtctcaggtattatggaggttgcgggaggagttgtcaggcaaagtgcacgcatctcagctaggtgcagtggtgtgttcctgtaatcccagctactagggaggctgaagtgggaggatcacttgaattggagaccagcctgggcaacagcatagtgagaccaggaagcaaaaaaaaaaaaaatgctgtcactcacatcttattcagtgaaggacttcagaggcaaatgtttctacctgaccctcctttctgccccacaggtctccaactggtttggcaacaagaggattcgctataagaaaaacatcggaaagttccaagaggaggcaaacatctatgctgtcaagaccgccgtgtcagtcacccaggggggccacagccgcaccagctccccgacacccccttcctctgcaggtggatcccactgtcaccccagctgactgttttgcacacttcctgcttttgttcccacttcctatctaggcaggatcatagcagagagggggccttttggggtgagagggaccgagctgagataggctggagatgtcaggggacagaggccattccagtgatcttagttctgcctttcttcccacgggtggccaaggaacagcctgctctttctgtgtgttggaatgttattttgtggataattggagtatagtagcatgtccccacaagagttgagagttgtggttcatcctctaccatcacgggctctattacactcttccctctctgcccccacaaggctctggcggctctttcaatctctcaggatctggagacatgtttctggggatgcctgggctcaacggagattcctattctgcttcccaggtcagatgcccatctcctctcgaatagggctttccccaactccatttcctctactttaggatacaagacctctttcctctgaggcttctcttcactgtcataccttcctctgctgcctgcaggtggaatcactccgacactcgatggggccagggggctatggggataacctcgggggaggccagatgtacagcccacgggaaatgagggtgagtggatcctgaagctcctctctgtccagttctcacaggacagaggggcattttccctagtaatgttgtgcccacacagggttcccagggctctctctgttttctgtactctgtctctcctttcaggcaaatggcagctggcaagaggctgtgaccccctcttcagtgacatccccaacggagggaccagggagtgttcactctgatacctccaactgatcttgcccctcagggtcacaggggtgggggctctcacaaggcgacttgaagaggacgcaggcttccagaggacaaaccccaatacaggagaagcacaagacagagaagggccaatggggtcatcccctccctaacgagactctctgtgctgggggtgctaattacatggcaggaagaatggggcctctaaggggagtgtggggtctgtctctcccttttttccatctttttcctctctcgctttctttcttacacagaaacatacacataccgagaaacctatttctcagacccctttttctcctctgtctttctctctccctctcccacacctcacacacacatactcccacttgcaactattctgtttctctcctgggctcccccactttcccttccccaccccacttgtatgctctggaatctgtggagacgccagccctgcccaatcagagatgccaaaaatggggacatgacttctggacagaggacatgggccacgcccccatgcatccccacccccgcccctccggacggcttacttacctcatacgcagctcatcttaaaccaatagaatcgctcggtggacgagagtgtctgactcagatatctacctcggagggagtttctgctactttagggaattattgactgggctttggggttgaacttttttttttttaaagaaagaaaaagaaaccctgggatccatctgttttttttgttgttgttgttgtttttgttgttgttggtggtggtggtggtggtggttcttaatttttaatttagtttggggaagtagcttgtttttttttttataaatatgttgatttcttgtcttttttttttatttcttactttcccatattaggggtgatagccaaaggggttctggtaagagaaagggggacaaacagaactggtaaagaggcccccctggctccaggcctgtccatcaggaagtaaattttacagggcaccaagctttgccccctaaaatcccttaggtgttctttgttcatgcaggcaggtttctgccgcatttgatgtggaggcagtgaagggcttgccctgctggcctctcatcccccttcttcccacaacccttgggcagggctggactcagtaattttgaggaaattgaagatgccatcttcccctgtgagtgacatgtctttaattttttaaaaaactactatttgaaaattggagggggaagaatgggaagggagttattgccaaatatgttaaatatgggttggggtgcttgtatatgtatcttcctcaatttccccataaatgaggtatctttttgtcacaccaaaatcaaggggtagggagagggaggaggttgcaaaaagccagatgtgggggaaaagtaacatcaacactgtcccatcctcagccctgaactagctaccatctgatcccctcagacattctcaggattttacaagactgtcagagtggggaacccctcccattaaagatccgggcaggactggggacaggttggaagtgtgatgggtgggggggtgggaggcatgggccgggggcagttctctcctcacttgtaaacttgtgtagtttcacagaaaaaaaacaaaatgcagttttaaataaagaaatttcttttttccctgggtttagttgagaatttttttcaaaaaacatgagaaaccccagaaaaaaaatgattttctttcacgaagttccaaacaggtttctctcctgttccccagccttgccttcatgatgcaggcccaattgcacccttgcagacaacagtctggcctgaaccctattgatgcaactttgcgcaatcaagatggggctccagtgggtcaccaggcagccctgatggactgatggaataaataggatcgggggctctgagggaatgagaccctagagggtacactccccatcccccagggaagtgactgtacccagaggctggtagtacccaggggtggggtgataattatttctctagtacctgaaggactcttgtcccaaaggcatgaattcctagcattccctgtgacaagacgactgaaagatgggggctggagagagggtgcaggccccacctagggcggaggccacagcagggagaggggcagacagagccaggaccctggaaggaagcaggatggcagccggaacagcagttggagcctgggtgctggtcctcagtctgtggggtgagccactccctcaaccccactgaccctccctgcagaaagcactttaaccccacaccccagtcgtcctagaacttttcccagaacccgaggaagtgcctttcaaggtccctcacccaccctgtccaaattttgttagccctcattcccttcctacccctctaccatggtgctatctcccaggggcagtagtaggtgctcaaaacatcacagcccggattggcgagccactggtgctgaagtgtaagggggcccccaagaaaccaccccagcggctggaatggaaactggtaagcggggctcctgttgcagcctcccaacttccagggagaccagcaatgatttggatccccgtcactctgcctcacagtcctttcccaaaggccttgcactgtttaggccctgcttctctgcttctagaacacaggccggacagaagcttggaaggtcctgtctccccagggaggaggcccctgggacagtgtggctcgtgtccttcccaacggctccctcttccttccggctgtcgggatccaggatgaggggattttccggtgccaggcaatgaacaggaatggaaaggagaccaagtccaactaccgagtccgtgtctaccgtaagaattccagggtcttctccaaggcctccctcttacctaagaaaaagccttcaaccccagccttggcccatgagggcctctgacttccactggcctcatttccacacacagagtttgagaaccttcacaattacagcctctgactggatttttcctccttcagagattcctgggaagccagaaattgtagattctgcctctgaactcacggctggtgttcccaataaggtagtggaagaaagcaggagaagtagaaaacggccctgtgaacaggaggcgagtgtgtgtgggtgtgggtgtgtggcatctctcattttcaaaggattctgaggtcaccactctttccccaggtggggacatgtgtgtcagagggaagctaccctgcagggactcttagctggcacttggatgggaagcccctggtgcctaatgagaagggtgagtcctaaggtgccccccaagctgccttctccctgatctcactcccacacccaccctgggataatttgtcttatcctcccatcataggagtatctgtgaaggaacagaccaggagacaccctgagacagggctcttcacactgcagtcggagctaatggtgaccccagcccggggaggagatccccgtcccaccttctcctgtagcttcagcccaggccttccccgacaccgggccttgcgcacagcccccatccagccccgtgtctggggtgagcataggtggggagggccccaagctcacgtgagcacgttctggaagtctgacccttagggaaagagggagtcaagcccatggccactgggatcactcacaagtgtaactctccacctcaaaacccttccaactcccagagcctgtgcctctggaggaggtccaattggtggtggagccagaaggtggagcagtagctcctggtggaaccgtaaccctgacctgtgaagtccctgcccagccctctcctcaaatccactggatgaaggatgtgagtgacctggagagaggggctgggaggtagggtgaaccataactagcaacagggagggcagagggctaacgagggaaaggcaggctaggagctgaggaggaagagagggtatctgaagatatggagacaaaaagacaagggttttgaaatagtctcctctccccttcccccaccagggtgtgcccttgccccttccccccagccctgtgctgatcctccctgagatagggcctcaggaccagggaacctacagctgtgtggccacccattccagccacgggccccaggaaagccgtgctgtcagcatcagcatcatcggtgagacctctccccaagccctacagaccctgggactagggtgcaggacagcacaggctctaatttcctgccccattctggccttatccctaacagccaccccacctctccctccatgcacccacacccaagcctcccctaccccacccaaattctgccaagagagcagccaagcctctcccttcttccctctgagctaaaaaaaggaacagacggctgggcgcggtggctcacgcctgtaatcccaacactttgggaggctgaggcgggcagatcacctgaggtagggagttcgagaccagcctgaccaacatggagaaaccccatttctactaaaaatacaaaattagccaggcatggtggcacatgcctgtaatcccagctacctgggaggccagctacttgagaggctgaggcaggagaattgcttgaacccaggaggcatagattgcgatgagccaagatcgcaccattgcatgccagcctgggcaacaaaagtgaaactccatctcaaaaaaaaaaagaaagggaaagactccactggggctcccactaaataaccctctctcaacccgaagtcttcctttctgactggatccaactttgtcttccagaaccaggcgaggaggggccaactgcaggtgaggggtttgataaagtcagggaagcagaagatagcccccaacacatgtgactggggggatggtcaacaagaaaggaatggtgagtggtggtggctgtgctctcaattttccctgtctccgtacaggctctgtgggaggatcagggctgggaactctagccctggccctggggatcctgggaggcctggggacagccgccctgctcattggggtcatcttgtggcaaaggcggcaacgccgaggagaggagaggtgagtggagaaagccagacccctcagacctagggcttccaggcagcaagcgaagaggggtcggggggtggaacgacaacgtgccgcattccccccaatctttctcctcaggaaggccccagaaaaccaggaggaagaggaggagcgtgcagaactgaatcagtcggaggaacctgaggcaggcgagagtagtactggagggccttgaggggcccacagacagatcccatccatcagctcccttttctttttcccttgaactgttctggcctcagaccaactctctcctgtataatctctctcctgtataaccccaccttgccaagctttcttctacaaccagagccccccacaatgatgattaaacacctgacacatcttgctcttgtgtgtctgtgtgtgtgtatgagacacaacctcacccctatacccttgagggccctgaaggaaagggactcacccccatacttcaccatactataccaaacatctactcaagttggggagaagatgcttctgtcgggggtgggggcgaacttgggaagagatcccatcaatatatttcaccttttttattgaatttgtattaaaggaggtagtgagggggcggaagcacttaagagtcagaatccatattagactctggggagtgaaaaattaaattaaatcagtaagatggggagtgggggaagagtcagagggaactttgcccacctttgaagatcaaatcaagaaatcagggaaagcaaagacttaggagaggagaaagacattctctcaatccatcctccttccccagggcagagaattaaacaacgttactgagtgagcctctgagcagaaggctctcccatctatgcacagacttcactcctcctccccaggccttcctggacaatgtccagggctggccttagccaacagaaatagaggggtcaagggggtccaggagtacggaagggtcagcagggaccctcaatactgattcttctctggctggaggtgggcaggaagcagacatagctcaaatactgagcagccaaaaaaagaagaagatggcgagaaacaggaagagggaatcctgccagctggaggctgggtgaccctgtcccagatccacacctgtgggagagaggaaagctgtggaagcatatgctcctaggctgggagggggcctgaggggattcacagggctccctgatgggagctgagtgtgactcttacctgtaccccggcggaaaggctcatgggcattgaagacggtggtgaaaaagccaaagggaaaagcaccaacaccaaatgagaagtggaagcccccggtatcaccaaatggctggaatccctagggaggcagaaaaagtcagacgggaagccggcaaatctgtcaaggaagggacacaactggacaagaagactcacccctctgctctccggagctggtctctggccctgggggcggggtggagtttttaatctgaggaagtggagagagaaagttaacagggatttttctcctcccatcttccacaccgttttccaagggcagaagccttcaatcttccctaagcaacacctccagtctctcacctgggatcctggggcttctggctccctcgcccataaagcgggacaaccttctctctgctgatcccagctttacatactggacactcttgccgttctggccgtgtctccagccactggggagaaaaaaggtggtttccagtatacaagagggtcttacagctcctcagacctccccatttccctcttcatctcctgagtacgcacctgatgaagacatggccaactggatgggggagaaaaaaaaaaaaaggtcaaactagctacagaaaagagagacacagaccctagacttcgcagaatcccatctaacccctcttcccaagcaacctgctgttgcttttcagattttctgcaacctctaccatgccagccaacttagttagccttcctgcttgtctgatcttccaacacctaaagctctgtccatcctcaacacactcaaccctctcctttctcctctccccaacaaacacatacaaattttcgtgccctctcttttctgcctttcaagttaatttctaatttccttcagccacctctttctgggtctcctcttttcaaccccaaccccatcactccaaaccaaacccctttactagcacattcccccattactcactttcaagctcaataatgtccctatctttatgaccctttaacctttcaagtctgcctctccacagtgcccttataccagccccctcccagatctcatctgaatgtgatccatatttcctggttctccccgactcaactgatgcgtgcctcccttaacctttgtgtctcacttgtttccacctgcacagctaagacccctcacttctctggggtaaggtggctcgggtctcacattgtcctgccactccccgccccaccttctcttctcagcacatcacgtgcctcagctcctggttcctaagacctttctttccacagatctcgaccgttatactcccacccacacataccagcaaagtcttatgtctcctgtcgggcttcacctatgggaacgtgccctccgattatctgtatgactgtatgattattcgctcctagcctctccagtatataagcgagacccaccacctcccgcccccctcctcgattctcaccagtacaggtggccacacacactgaccacagcttcccgagcagtctccaaacatatattacattcgaaggtcgcgcccgccccgccccgctcgcgatttggcccttcggggcccccgtcctcctcctccgctgctgccatggccggttttgtttcgccccacgtacccttcagtccccccaaatacacatacacacgccccaacaaaccagaaaccacctcctgcccacgatcgttgggcaggcttcaaggtttcctaatcactattggtctgaatgcctgccagtcacaaagaattcaaaagaaaggattggcccaaagggtaggggcgggaaaaggttagtgcagtcctgccttcgcacaatggctattggctgatacggtctaagtcaatgtgcaatgccaagggattggtaataactcgctacacgctgtcgcctggccaaggagggctttattcgtctgagtagttgtcagtcataaccaaagccataagcaatttgctcgggactacctatagacctcgcccactataagcccctttctttccttcgcttcctcttttagagaatgtccggattgctattggactttggagcgtatggctccaaatcaactcattggctaaaacttgacggaaaatggtggttaggtaaaacgcgcctgcgcagcacgcggcgggacgggggtgggccaatcctgtgagggtttaaccttctcttgttccacctcttcacccctatcttgtcgccatggtgactgctctacaattggcgaggcttgcacttcaaagtcctaggctcgcttcatccgggtccttcagctgtggactttctgctgattgggccttttccttttcccctgattggccgacatcgggaaagacggcgaagagctaggaaaagagggaaaacactagggtcgcagggttcaaaatggctccaacctcctttggtgacgtagagagcagaacttgggtctgcccctcccttttagttaagggagcagaactgggattagcccgacgtttggatagtgggaacatcgatctgcggcgctggtgttaacccaactcattcggctggacgactcagccctccccatattaggtgatttacagagcaaaactgaactaaaggcccacccctttcttaatgttgtacacagagtagaacaggattgacttcaactccgttttaaaccttcagagcaggaaagctctgggctcaacccctttgtgagtggtgcaaaagggacaaagcccgccccttttaaggagacccgcggaggctagacccgccctttcctctttataatttgcccatcagaaatagggtcttcttcccaggttggaccccggggagtttgggcttttcctacaatcactgaccctcactgtgactaaaggagcagaattaggtaacagtcctcccactaccaatcctcttcccgagggcatgtaaactaatgcagggtaaaggtgtggctagaggggggaccttgataaaagatcccatgtgactcaagagtaaggaaagatgagaagttagcagttgcgtaaagaaggactggggcagatgaggattcaggaagcttgaggtttaggaaggaagatattgagagggaaaggtggaaatgaaggagagtgaagtgatggaatgatcctagtaaagggataatgggagtggaggaagagaagagggggtggaaaactagatacatggctaccaaattaaggaggcacgcgcattccagaggaatcggcattcttcctcactttttatttttctagaaagcacccctgaagccaaatttccattggaagaaaagatgtacccatattgtatgttgtgagaaggggttgtctcagcttgggcaagtaaggagactgatacgaaggaagtaggaaagaaaaggtacagaggtaaaagagcatggaaaaggaaagggtcagggataaggccaaagagatctcttctctttaaaggccagagaaggcaggtggaggggggagctggactgctgggagatagtgagggacaaagggcaaaggaaaccagaccagaggactggagagtgagatggagtgagatggagtcctggagagaaaaagaagagaggtgaacttaatgcttgtcatatggtaggtagatgcttgataaatgtttagaattgaatgggtacgggaaaaggggtccttaagaatagttggggggaataagcagcagataaccggagttgagaaaaaaagagaccaagtaaaagtggcagttaaaagagagctgatggagaataaaggaaggaatgtgcggaaggaggaatacagcaccaggggatccagagctgaaagggagttagagaaaaaaaagatgcagctggagccagagatgggggcaaagaccgagggagagccctgggccggggctcgcaagaggacactggtagatgtggggaggagatgccagagtttctgggagacgattggcaaaacaggctgcccatcaccgccctccacttcctggccggccccggaaaccagcaggcgttggggaggggtggcgggggaatagcggcggcagcagccccagccctcagagagacagcagaaagggagggagggagggtgctggggggacagccccccaccattcctaccgctatgggcccaacctcccactcccacctcccctccatcggccggggctaggacacccccaaatcccgtcgcccccttggcaccgacaccccgacagagacagagacacagccatccgccaccaccgctgccgcagcctggctggggagggggccagccccccaggccccctacccctctgaggtgtgggcgggaaagggatgggaggaggagggaagagggtgctgaaagcgactaggatgaggggaaggggagagattgggtctgggagggccgactgggggagagggttgctggggaaaggagaggggccgactgggaagagggttgctggggataggagaggggacctgagagggaggaaggatggaagagacctgggagggaggagaaatggaaacccttgtgaatttgggactgggagcgtgcacagggaatcctggagagggaattccctacaccttccccaattccttttcttgccctttgaccccacatgactcttgaagggtcatgaggggagaaggccagcagaatttgcctcttaggaatacccttaggtgcctctgtttccatctaggcacaggacctcttgtttctcagtggccttccacactgctagacccttactgacacacaaatgccttatgggagccatgttttctacattgagtctgtgtgcctttgacatgtttaatggcttgtgtgcaactaggttgtcccaatgctatccataggctgtgtagaaatggtgtgttattttctatcagaattgcccattcttcattcttgtgtccatgtctcacatccagttttgacatgttttaagtaccgcatgtgtgtgagttttcatatattgcacctgttctataatttcatgttacttgcacattttatgttttggcatgtttatttcagcatgtgaaggttatataccttattttgctttggctgacatgtccatggtcctaccatttgcagtagtcttcatgtgtgggatcccatggcttggctgaataccccacactctgatgtctgactgaattggcctgtttgctgtgttttcccagtcacagttcacagaacacatgtgtatgcgcctttgcatgatacactgatgtaacaggaccatagaatgtgtgttataaatttgtcatcagtatattttgtgagccgtatgctcattaaatttggccctccattgcatttctaaatccttggacttttgttctccaaagagggtcacttaatatcaagtgttaagagaagaaggtaactgggtctccaggtctgcaaagaaccatccctgcatgccttaccttggtgacctccctggcccatacctctctacacaaacattatctttccagtggctgtgtacagtctgtgtccatgagctcaatgcatgtcacagggtcaatcctgctgtgaaccccattgttggtatttatttatggacattatcctccattctttgcactgttggcacacatttgatgagagcagcatctttccctgtggcatcttgatcccattcggtacatttctcttgtgagatgacctcttcctgattattgttactctgccttcattatggctatgtattgcatgtatctattcagagtcggttaccattaggcttggtgtgttcgttactttctcagtgacttcttttagtagtcacttctactcaagaggataactatctaatttgtgatcagaaccgccatctctgtcattaactgtggctctatgggtgggtatacagccttagaatctgttcagcaagtgtttattgagcacctactccatctcctattgtcctggcactggagataagacagagtccctgtccttaagctgcttacagcctaaggagggaaacaaaaacgccagtcaacacatagtgtgttgtcaagatcagtggttcttaaattcaggcgcacatcagactcaccagagggcttgttgaaatacagattgctagccagccacgatggctcacacctgtaatcccaacagtttggaaggctgaggcaggaggatcgcgtgagtccaggagttcaaaaccagcctgagtgacagagtgagaaaaagaaaaacagattgctggacctaatgcccagaatttctgattcagtagatctggggtgaagtctaataatttgcatttctatacttcgagacccgctgatcaagataaaagtgtaaggaaagcacaggcctggaggggttcaggcagccctccaaaaggtgacactgagctgtgtgaggcaggagaagagacaggcattccagccaaagggaacagcatgttcaaggtggggaagcatgaaagatcatggtgtctgaggaactgaagtgaatcagtttgactggaacaaagagttttgtgaggatgtggtcgaagatgtaagcagaagtcaacttatcaagaagagcctttaggcaagacagggaaatgctctgtgtttcagaaaaatctgtgctaacagaaaaatctctgtggttgctacgtggaagatggattggagggagttgggagcctactccacatagttcaggggagaaatgatgctgttctgaacttgtaggggcagtgggatggagcagctcagaaagcctacggtattccaactggcagggtctcctgtttcctctattgcctgttaccttctcgcttggcaataggcttacctttgagcatagcccttcccatcatgggaagacagtgcctgtggcctcagtaggaatgacaggtatttgcctgaacaccctttttgtgaattgttaccctgcccccaacactggggcagagtggaggaaggaggaagaacctagaacacaggttctgtgttcctgcctctcttcctcttgagccctttcctctcccagggcaagtgctgttaggtcacctttactccattccctccttttttcacttggtgaggcctcacacactgtacctgcccacgcaaagtgtcactagaaggaagggaaagggtagtaggattcgtttgcctgtctggaggtaggattggtctttgtagctattccaggtatgtccataagtttacctaggaataggggagctgcctgggtggagagggatttttctagttatgcatttacattcttttatctgtcactgggtgtaattataaatttgtgtctatgtgtgaacatgttagtctttgtatgactgtgtgtctgttggcattagtgacacgaacttttaatcttgccatttggcccttgggtatatggctgtgagtgttctgtcacaatcaccatatatgctgtgtgctgtgttcgtatatatatatgcaatacataccagtgtcagcgtaatggagtggttaggaacacaggcggcttagatttaacctagaaactgctgtttaggagctgtatgacctcaggtaagttatttagcctccctgggcctatttcctataaaatgtaaatagtaatagtactttctagactatcatatgcatcattttaagagtttaacttaatgtatagaccagtactgttctacagaaatataatgcaagccacaatgtaatttttttatggtagccacatttttacaaggcaaaaagagtgaaattaattttagtaatatattttcttgaatctgataacatccaaaagattataatttctttttttttttttggaaatggagtctcactccattgcccaggctagagtgcagtggcgtgatcttggctcactgcaacctccgcctcccggattcaagcaattctcctgcctcagcctcccgagtagctgggattaaaggcatgcgccaacaggcccggctaatttttgtatttttagtagagacggggtttcaccatgttggtcaggctggtcctgaactcctgacctcgtgatctgcccacctcggcttcccaaagtgctgggattacaggcgtgagccactgcgcccggcccaagattataatttcaaaatgtagtcagcataaaagattagtaatggatatctcacattttgttttttattcagtctttgaaatctgatgtgtattttacatttccagcacatctcagttcagactagctgcatttcaagtagccacatgtaggtggtggctactttctcggacagcacaagtatagaccattataagacccttaccagctacaagtgttagctattattcttgttgtcatttattatcaggtatctgtgaattgtagatgtctgtgtcttgtgtctcttgtctgaatatatccggagcctttgggaagagtggtgggagagcagtcctgagctctttctccaccaccctcatcctagagagccttcctgggaaggtttcaatgagacccctgccccagtttgtgtctcaggcccttgtcctcatagcaccagcccccagccctgccttctgtgccttgcctaccccactctcctccagaaaccaggctgattgtcccttgccccatcccctgcaggtggccagaatggatttgtggccaggggcatggatgctgctgctgctgctcttcctgctgctgctcttcctgctgcccaccctgtggttctgcagccccagtgccaagtacttcttcaagatggccttctacaatggctggatcctcttcctggctgtgctcgccatccctgtgtgtgccgtgcgaggacgcaacgtcgagaacatgaagtgaggggcaaggggtcttgggcaatgagggaacctaagggtacaaagtgagtagtggattgggggaagggggcatggtgtgtgtagaaaagactgagagagaccagagacagggaatggggagaggactgcaaaggtggtcagaaagacagtaaggtggggggagctgaggcatgcagatggacatcaatggatcccactgggaccccttgccatgaccccacaggatcttgcgtctaatgctgctccacatcaaatacctgtacgggatccgagtggaggtgcgaggggctcaccacttccctccctcgcagccctatgttgttgtctccaaccaccagagctctctcgatctgcttggtgagaccccaccacagggcacacctcccccagccatgcctcccctcctgaaaccttccctagaatatcttctcctagagatcctcaattccccttcctctgggacattgcccccttgcctcccactcaggccttcattccctgggtagaactgccctcataagcagggtacatatacttttggtcaccctttccttcacttggggcccccctccctgcctagtctcctccttcacctccagtccctaccagagggtgatgagctgggtgaggtgggttgccttctgtgacactctgcctccaccccgatcctcacccactcccaccctgcccaagggatgatggaggtactgccaggccgctgtgtgcccattgccaagcgcgagctactgtgggctggctctgccgggctggcctgctggctggcaggagtcatcttcatcgaccggaagcgcacgggggatgccatcagtgtcatgtctgaggtcgcccagaccctgctcacccaggacgtgagtcatcctggggaaatgggggattggagggatacagagtagaacagttgtaaataaactgatatgcagggccagtgggcctcaaaggtcccattataacatcacacctattctgactcctccatatgtatttgtcttctttgaccctctttctcccccaggtgagggtctgggtgtttcctgagggaacgagaaaccacaatggctccatgctgcccttcaaacgtggcgccttccatcttgcagtgcaggcccaggtgactactgctcttcgttctgctactcagctgccaacccccaccattccctcatctctgggcaggggcttattgtaggagtctctgaagagagctgtggactgacctgctttaacccttccccaggttcccattgtccccatagtcatgtcctcctaccaagacttctactgcaagaaggagcgtcgcttcacctcgggtgagggctttgagcagttctggggtagggtgtgtccggagaggctgggaggacatccctgtgaggcagggggatcattcagtgtcagagccatgagatgtctacacagtcatctagtctaaccccacatcagccaataagtctttactaagcacccaccataccctgccagatgggtagcacttggtcccaccaagagaggctgttactaatcttaacaggaaagataaggcctgtgtgcacaaagctgtaatgaataacactcattcagcagtaaatgccaaacccagaggaggggggctggaggggtgctgaggagatgtctgaactggggattggagaaggctttgtataggagaagggcctcagaagtggcagctggcaagcccagggatggttgtccagggttgggggaagagaactgaaaggttgaggaagagtatcactcggaagctgggccccacctgtgggcaaagacctgggtggacaggccatgatggtgctccccttgccccaggacaatgtcaggtgcgggtgctgcccccagtgcccacggaagggctgacaccagatgacgtcccagctctggctgacagagtccggcactccatgctcactgttttccgggaaatctccactgatggccggggtggtggtgactatctgaagaagcctgggggcggtgggtgaaccctggctctgagctctcctcccatctgtccccatcttcctccccacacctacccacccagtgggccctgaagcagggccaaaccctcttccttgtctcccctctccccacttattctcctatttggaatcttcaacttctgaagtgaatgtggatacagcgccactcctgccccctcttggccccatccatggactcttgcctcggtgcagtctccactcttgacccccacctcctactgtcttgtctgtgggacagttgcctccccctcatctccagtgactcagcctacacaagggaggggaacattccatccccagtggagtctcttcctatgtggtcttctctacccctctaccccacattggccagtggactcatccattctttggaacaaatcccccccactccaaagtccatggattcaatggactcatccatttgtgaggaggacttctcgccctctggctggaagctgatacctgaagcactcccaggctcatcctgggagctttcctcagcaccttcaccttccctcccagtgtagcctcctgtcagtgggggctggacccttctaattcagaggtctcatgcctgcccttgcccagatgcccagggtcgtgcactctctgggataccagttcagtctccacatttctggttttctgtccccatagtacagttcttcagtggacatgaccccacccagccccctgcagccctgctgcaccatctcaccagacacaaggggaagaagcagacatcaggtgctgcactcacttctgccccctggggagttggggaaaggaacgaaccctggctggaggggataggagggcttttaatttatttctttttctgttgaggcttccccctctctgagccagttttcatttcttcctggtggcattagccactccctgcctctcactccagacctgttcccacaactggggaggtaggctgggagcaaaaggagagggtgggacccagttttgcgtggttggtttttattaattatctggataacagcaaaaaaactgaaaataaagagagagagagatctgggtgttggtggttgcatttgttaaggaattgaagcagttcttgcccaggcaacctgcccccagccagaagactcaggggcaggccaagaacacaggcctccccctttcttcagctctctgaagtttccattgttcattgctctttggtggctgatagccttatctgcagctcacagtcggccaatcccagaggattagtgggtccggtttctgtataaattagggggcaggggtgctgtagaggcttcttatcgatgattgacgccgaggcccaggctgttgtcctcacaggagcctggttaatgacatggcagacacagtggctgtggtcagcctggagtggactacactgccactctcaccaaacaataagtgaaactgttgggctggggacaggatttcagaagagaacgatggtaaagtggagaggcatgaggatagtgaatgttggagaggggcttggaggaaagagggaatgcctgaatggagaggggtcttggggaaagttggggaatagaagtcaaggcgggaggagtgtgaggactcacaggcacctagcctctcctccagcagcagcacctggtcgctgagagattcgatccggtcaccccggccccacagctcagccacctgttctggctgcagctcttcaggcggcacgggcagcaccgctctgacccaggccccagcctgaccggcccactagaaaggaagagatgcctcagggtattgacagtgacgtctggcctcgccccacccagcaggcttggctcacctgctccagccgctccaggcgccctcgcagctcgtgaatctcctgcttcagagcgcgctcatctttttccgcctcccgaactagggacaaaggagaccaagagtgtgaccactacccgagcccggacgcccgtcccgagtccctcgggtggcccgtactcctgcccactcaccggccacgctgagtatgctggcactggttgggggctctggggacccctccatgcaggtgcgcccgtccacgcctagcactaggtcatgggggcagccgcaggtgaagctgcctgccgtattaaaacaatggtgcgagcagagggtgatgctggtcctacattcatccacgtctagttaccgaaaaaaggaaggggctgagagagggggcgggggcaagcacctgggtaggtggggaggacaagctgactcacccacatgacagtgcttccctccccagccgggggcgcactcgcactggtcaggcctaacgcagacgcctccgttcaggcaaggcttggcgcagatggctgaggacagaggaagtggggttcagactcaaaccgacgacccagctccccagctccgtggggcgcgcctcccgcaaggcccggaagacccagcctcaccttcacaggtgagcgcccccgggtgccgcttcttccagccctggcagcacactgcatgggtctgctgaacctcccgcctcacctcccgccacataacgcggtacatggtcctggaacacagcgcccggctcaggaccctgagtacgggtcctagttggggttcttggggtcccatctccccatccctcacctgtaagtgctgcagatgcgcctcccagcgcacaaggtcaggtagggcttgtacactggttggctgtaggactcgttgtagtggagcgggaccaccagtgtctgcttggagcagactccctgactgcgtccatgccagaggatgaggtgggagagattgagtaggccaggccctggggagccaggagtcccacttccctcaagaggctactgaggccccccgctctccctccagatgacagcctctcacccccattctaaacttacagttatgttttgcctcctgtgaagccccacccccagcagaaggctcctgagaagagctcaccccgggccctaccccctctgttgtcacctctctctgagggatccacccttggccccctcgcctggtatcagtagcaggaggaaggagaatccgcctaagagagtgcacagctcagccctggaccccatgattcgctttgacgctggaccctacaggctgcaggcaagaaaaggttaatggatgcccgtcccctctcctattaatttctccagcactagtccctccaagggcactctgcaggtaccctctaagggagtcaggacattcacttttacatactagccaccaggattgcctacacctgtgtgtacaacccaacactatcctgtccttagcatatcatgatcctttcagcatcataaaagctcacaccccagcacactccctccacctcccctctaacctacttacttctaatcccctctgcacaacctggagggacacacagtcaaccctccccttatgaccctcctgtctttttttgggtttttttttgtttttgtttttgagaaggagtttcgctcttactacccaggctggaatgcaatggcatgttcttgcctcaccgcacgacctccgccccccaggttcaagtgattctcctgcctcagcctcccaaatagctgggattacaggcatgcgccaccacgcctggctaattttgttttgttttgttttgtagggtgtgagggtatatagctagggttttttttttttggttttttttttgttgttgttttttgagacggagtctcgctgtcaccctggctggagtgcagtggtgcgatctcggcttgctgcaagctccgcctcccgggttcatgccattctcctgcctcagcctcccgagtagctgggactacaggcgcctgccaccacgcccggctaattttgttttgtatttttagtagagacggggtttctccatgttggtcaggctggtctcgaactcccgacttcaggtgatccgcctgccttggcctcccaaagtgctgggattacaggtgtgagccaccatgcctggccaaccctcctgtctttaacatgccctcttataacttcataccttcaaaaccctagctggttgggcgcggtggctcacacctgtaatcccagcactttgggaggctgaggtgggtggatcatgaggtcaggagttcgagaccagcctggccaagatggtgaaacccatctctactaaaaaatacaaaaaattagccaggcgcagtggtggacgcctgtaatcccagctactcgggaagctgaggcaggagaatcccttgaaccctggaggcagaggttgcagtgaaccaagatcatgccactgcactctagcctgggcgacagagcaagactccgtctcaaaaaaacaaacaaaacaaacaaacaaaaaaaacccctagctatataccttcacaccgtacacacaaaccaagcacctggaaactccacacctttcacacactgctactcccctcacatacccacaccgtcacataacgccctaaatgcacatcccttgctccaacaaaacaccccgcaactcatgcccaccctaaggctctgagtaaaccccactctttccccatttgaaattctctccccacttgccttcctctctctctccattcccacctggcttctttctcctgggaggcttcaagcagaccagcctcagcagaagcagctcagactggtgggtgggcctggcaggctaagaaggagaggaggggctgggccagagagtcctcccattcctgccccctcccacaagcctcctccttagctccagcagggtcagctcagtagggtcaagtcccactaccctcatccccaccccagcaaagggctccctagaagtatctttccaaccctctgaggcccctatttctggactccccagatcagaagctatgagctctgtaacaccaccagtacccccttgaacccaaaacagactaggggagagttagggggcagggagagaaccagctgcagggaacaaagcagttcaggttatgggagaaaaagcaagatcagctgaggaaagctagaagggcaagtcgtcacaaaggggcaggggggcagcccagggcaccaaggggaaaactgcccccctctcttcatgacatttgttagggcttagggggaacagaattgagtcagccaccaccccccatgccagaacagacagggccctattgtctcagccaaaattccttctttcaaggaagaggaggctcattgtccagccctacacccagctctggcccacaaagctcaaaagcggcacaacgaatgcccaccctgaccctctgccccctcgtctagcctgggggtggcaggcgcattccacccatgaggctgaggcccaaaccactggagccctgagcttaaccccccagtcttggggactgggagaggaagagaattgtcttcagcaggaaagaacccgcagagaaccaggaacccacaaagaatgggcattgagagagagcggaaacaccaagggggtccccaccctagaccaggcatctgggcacccaggcctcaggctccgcccccaccctccttggggagccaggtcccctccacctggaaatgagccaagtcacactgaggaaatggaactttatttccataaatacagggataacacctattcaaaggtagttaaaagagggcctggggcctcaaagaaactaggctctcccaggggggtactccaacactgatcatagggactgggggatccccaaacctgagatgggcctcataggccacagatattccccaacactgacacttcaagaacggaactgtccccataggggagcctcagaaccccactctcatgggtagtccctcttaggagttgggagggctgatgtcaggggactttagagaaaaaagggaacatggggaggagagaagctaaaaatgtcctgagtggcctggaaggagacccctgtggtgggcagggggtgggttctccacccatacagccagatacggaggagcagcagcagcaaaagcagccacaagttaaaaacatggtttctcacttcccaacttcggccttgagagaaagggacagcacggagcaatcccccaaatgagaggacatgaggtaggggaggcctggaattgtcattcatggaggagcagaggaagggggttctgggaggccaagtctctactaaaaccccgtctctactaaaaatgggggataatatgggagcaatgaggtggtcacaggcacaccaaagcctgacatctgctttccaaggccaccacttggtctctggaccgaggagttcctggggacccctgaatatatcctcaggagagccaaggttcaatgcaggtctcataaagggtacggttggagtgccaggctgtgtgggagataccggccattggacacctcactatggccccccgggccaatagagtcttcaacccaaaagaatcccgcagataaaccttcaaggtggtcgaaggggcgtggaagcatggaagagagacacaaggagagacaaagtgagttactgctgggatcctggacctcctccccacagggtgaacccttcagctcaggagtcacagagagggctctggaataaggtgggacagcggctagaaggggaagtaatcccagggggctcaccagttgctcctccatctccaggacggtctcatttgcatcatagaaaccaaagaagctacaaagagatttggggggaggttatcagaagagctggagaaaatctggccgggcgcagtggcacacgcctgtaattgcagcactttgggaggccaaggagggcaaatcacctgaggccaggagttcaagaccagcctgaccaaaatggtgaaaccccatctctactaaaaatacaaaaattagctgggcatggtggcagatgcctgcaagcccagctacccaagaggctgaggcaggataattacttgaacccgggaggtggaggttgcattgagtcgagatcgcaccactgcacttcagcctgggtgacagagcgggaccccatctcaaaaaggaaaggaaaggaaaaaggaaagaaaaaagaaaaggaaaaaagaaaggaagaaatcaaggtgggctaaggtcccaaaggaacccaaggcctactggggagacaggtagcagggaggacactcaaaactaccttactggatataatgtacttcatgaggtgatacactgaagatacgacctcacttctgtagaaaccccatcaaaaatgcattactggccgggcgaggtggctcacacctgtaatcccagcactttgggaggccaaggccggcggatcacctgaggtcgggagttcaagaccagcctggccaacgtggtgaaaccccatctctactaaaaatacaaaattagctgggcgtggtggctcaagcctgtaatcccagcactttgggaggccgaggagggtggatcatctgaggtcaggaattcgagaccagcctggccaacacggagaaaccctgtctctactaaaaatacaaaattagctgggcgtggtgggcgcctgtaatcccagctactcaggaggcagaggcaggagaattgcttgattctgggacgcaaaggttgcagtgagccgggatggcgccactgcactccagcctggcgacagagtgagactttgtctcaaaaaaaaaaaaaaaagaggccaggtgtggtggctcatgcctgtaatcccagcactttgggagaccaaggagggtggatcacctgaggtcaggagttcaagaccagcctggccaacatggagaaaccccgtctctactaaaaatacaaaattagttgggcatggtggtgggcgcctataatcccagctactcaggaggctaagacaggagaatcacttgaacctggcaggcggaggttgcagtgggccgagatttgccattgcactccagcctgggcaacaagagtgaaactccaactcaaacaaacaaacaaacaaaaagatactaaagagacgtaacaagatcatgcaactcaagatcctgatttggatcttccactgtatatttttttctgtaaggacagttggaaaaatttgaataatctgtgagcgcatattcaggaaaatttgaatctatgtttatatttaaatataacattaacgtatataaataaatgtatatatatttagagaaaaaagatattaatgtaaacatgacaaaatgttaacatttgcgaaatctaggtgaggagtataaatgactgctttttgctattttggtaacttttttttttttttttgagacagggtcttactctgtcacccaggcaggagtgcaatggtgagatctcggctcactgcagccttggcctcctaggctcaagcaattctcgtacctcagcctcccaagtagctgggactacaagggcacaccaccacgcccagctaatttttgtattttaggtaaagacagggttttgccatgttgcccaggctggtctcaaacccctgggctcatgcctcggcctcccaaagtgctaggattacaggcgcaaacttttcttaagtatgaaattatttcaaaatagaaaggtcttaaaatcctttttttcttttttttttgagacagagccttgctctgtcacccaggctggagtgcagtggcaccctgtcggctcattgcaacctccgcctcctggtttcaagttctcctgcctcagcctcctgagtagctggaactacaggcgtgcgccaccaggcccactaatttttgtatttttagtagagatggggtttctcaatgttagccagctgttctcgaactcctgacctcaggtgatccacccgcctcggcttcccaaagtgctgggattataggagtgagccaccgcacccagccagatggagttaaaatcttttaattaaaaaatattggccaggcaaggccgggtgcgtgggctcacacctataatcctagcactttgggaggccgaggcgggtggatcacgaggtcaggagatcgaaaccatcctggctaacacagtgaaaccccgtctctactaaaaatacaaaaaaattagccgggcgtggtggcgggtgcctgtagtcccagcgactcaggaggctgaggcaggagaatggcgtgaacctgggaggcagagcttgcagtgagccgagatcacgccactgcactccagcctgggcgaccgagcgaagactccaactcaaaaaatatatatctatctatatatagagagagatatatattggccaggcgcagtggctcacgcctgtaatcccaacactttgggaggccgaagcaggcggatcacaaggtcaggagatcgagaccatcctggctaacacagtgaaaccccgtctctaccagaaatactaaaaattagccaggcatggtggtgggcacctgtagtcccagccacttgggaggtgaggcaggagaatggcttgaacccaggaggcggaggttgcagtgagccgagattgtgctattacactctagcctgggcgacaagaacaaaactctgtctcaaaaaaaaaaaaaaggaagaaacagtgacttggaacattaaaaatgttatataaccatgagctatcactgtcattcatagggttgtggtagatgtgaaatgacatgatgtacataaaactcatcacttactattatattattacaatattttaagagatgtcctgccttcactgaaaactgtccagtgccttcccatctcactcagaatttaaaaaaaaaaatcaaaagcctggttaccgggactgtcgggaaatagggatgaggatatatatatatatatatatattttttttttttttttttttgagatggagtttcgctcttgttgcccaggctggagtgcaatggcgcaatctcagctcactgcaacctctgcctcccaggttcaagcgattctcctgcctcagcctcccaagtagctgggattacatgcatgcatcaccacacccagctagttttgtatttttagtacagacagggtttctccatgttggtcgggctagtctcgaactcccgacctcaggtgatccactgcctcggcctcccaaagtgctgggattacaggcgtgagccaccacacccagtctattttttaatgggtatacggtttcagtttggggaaaaagaagttctggagatggatggtgctgatgggtgatggttttacaatgatgtgagtatacttaatgccacaaaactgtacatttttaaatggttaaaatggcaattttatgttatgtatattttatcacaaaaaaaagaaaaaaaaatatcaagggccttaccttgacctgctaaggtttgacatgcctggtcccctgctaccacttttagctcctctcctgtcctctccccagctccttgtgcactagccatgctggcctccttattgctcacacgtgcttcagggcctctgcaggtgccagaccttctccctggggggttcttccacccagagcacaactccctccttcacttccttcagtctctaattgaatggtgacttttccaggaggacttcttcggccactattgaaactaggccccggacatcctctaatcctttcccctgccttattacctgacatatatatttgtatgtatgtatcagctatcttacaaactagaatataagctacataacattagggacttctcttttatttaccactgcatccctagggcccagaacaagcctgcgcccataatgttgaataaatatttgttgagcaattcaagtagctcaggtgacattacagatcacacatggtgacctataacacaggcaagcacatagtaccatggagccatggatttttttctaaggaataggatggaggggacaaagctggaggctgttataatagtccaggtaagtaaagaggtggtaggaaatgtgataaaatggtataaaactacacacacacattgaaccaatgtgaatttcctggttttgatactgtgctataattacataggatgcaaccactgggggaagctgggtgaagggcctcgctatactatctttgcaatttcctatgaatctataagaatttcaaaattaaaagtttttataaagtgggggagggggtgatagggatggagaggagaagagtcagcaggacttagtgactggcttgatacaaggggttgggatatgactcccaggttttggtcttgggtgacatgatgaatggggggaggagcactaactgaacagtggaaggagcaggccagtttaggcatgagataaagaccaactggggttgggggatgtctttagccaatcttcaggccacaaaatcccttattacctggactgccagggagtaataacaccatcatcagggcccccaatcagcaccaggtggcccacacgcagaaagttcttccgccatactgtaggatgggaagaagagaggctgagtcagccacaggggtcaggccaggttggagagggagacatagggagtcaaagaagcagaaaaagcaacacaggtaggagcctgaattctcacctgtggcattgggatggtctctttccccattgatcagggccaggaagctgctggcattgaggtacaagtcatcgtggtggggatctgggtacaaacagcagttagaaaaagaagcagaaaagggaggcaagactggtggtgaaaagcccaataaggaagctgcagcaatagtcaaggtggatagtaataaaatagtagtgataatgtaggccaggtgcggtggctcacacctgtaatcccagcactttgggaggtagaggcaggtggatcacttgaagtcgggagtttgagaccagcctggctaacatggcgaaaccctgtctctactaaaaatacaaaagttagccaggcgtggtggtgcatgcctgtaatcccagttactcggggcgctggaatcacttgaacccaggaggtggaggttacagtgagccgagactgcaccactgcactccatcctgggagacacagtgagactccatctcaaaataataatagtagtgataacaaccgtaaacatagtaacaagtacttttttttttttagatgaaatctcactccgtcacccaggctgaagtgcagtggcaggatctccgctcactgcaacatctgcctcccgggttcaagcaattctcctgactcagcatcctgagtagctgggattacaagcgtgtgcccacattcagctaaattttttttgtatttttagtagagatggggtttcaccatgttggccaggctggtctcgaacccgacctcaggtgatgcgcccacctccccctgccaagatattgggattacaggtgtgagccaccacacctggcaatagcaagtacttctatctagtatctactatatgagccaggtactattcaaagtacattgcattcatttatttatttaatccttacaaccacctggtgaagtacatgctataatattttacagataaggaaaactgagtaacagaatggttaagtaacttgcccaaaggcacccaatagggtcaagattcaaacccaagtattctggccccatggtctggtctagaggttggcaaactgtgaccaaaggaccaaatccagcctgctacttgtttttgtaaatgaagttttactggaacacaggcacattcattcacatatggtacatggctgctttcacactacaacagcagaattgaggagttgtgaaacagactatatgtcctacaaagtcaaaaatatttactctctggccctttatagacaaggtttgctgactcccacatcagactaaaccttctaaggcaataaggtgacacacttaaaacattctgggccaggtgcaatggttcacacctgtaatcccagcactttgggaggccgaggcgagtggatcacctgaggtcaggagttcgagaccagcctggccaacatggcgaaactccatctctacttaaaatacaaaacttagccgggcatgatggcgcctgcctgtaatcccagctactagggggactgaggcaggaggatcacttgaacctgggaggcggaggttgcagtgagccgagatggtgcactgcactccagcctgggcaacagaacaagactccgtctcaaaaaaaaaaaaaattctgaacagagcctgttcaaataactcaataaatgtaagttatctttattgtcatcactgctattggttgtagcagaggtggaagcaactgacctgatccatggaagccccagttcagcatccccactcaccatgccagtagttgcagatggagaattcctggccccaggggctatagcagatccgatagaggttagaccgcatggaggtggggaacagccacttcaagtagtccgtgtctggcaagcgaatggcaatgctaagtgaccataaacctctgttcccccaaaactcagggcattctatggagtctagtgcccactcacctccatactgtcccatctgtggagaggagagggagatgaaagaatccacgttgtgatcatccatgacagaaagcagagcccggcacacaaggccccctgtaagcagaacaccacattgggcaggcacttaaggacagcaaagccagcagcaccccccacccccaccacacacacacacacagagacacacacagacatacactgtacacaaaggagactgaggcttacagaaggcaggcacaccctgtgccaaaaggtcacacatcatataagtgactgagcccgaattagatgctgggcctcctgcctctagttctaggatgtttttacctgccccattagcccttatgtccaagaaccatgggtaacaggaagcaaaagggcagcagtgtagggagcctccctcccattcaagacagagatgagacccaggtgctgagggaagtcagaaaggaagggctcaggtaccagggttgtgcctggagcaatgtggttcagaaaaagggacgctaggaagtgtccctcagataaggatcaagcctcagatagggcttaggagttaggggcaggggagtcgcctaccctgcgagtagcagatgagatgcaccccttgaggggcctttgccatgatggggaccacagcctctcggaacccttgcacctgttcccacaggggtcgcaagctctctctcccatcgaagagatcgagcactgtcaccacagtcccggggtgtgtctgtgggaagggggcaatgcagccaccggggataggctaagaagctcccacacgccaccccctggcccgcgtccacaggtctattgtaccctgctagaaccagggatcccgtcccccaactctcccccacgccagcaccagctccctgaggaactgggcaggcccagaggggtggctttcagttccccgctctccctcccctgccacagtagacgcctctaacgccctgcacccaggtgtcccctgccagacctcattgatgtattccagcaggtggcggaagctgtacgagctgtcgaagagcccatgcaccacgatgaccggcttgtaggacgcgcggtggggcgcgggggctgcaagcagcagcagcggcaggaaaggcaacagaagcaggacccacgccgcggggagccgctgcccccagagccccagcatgctcccgcctgagaaaggggtgataagggcatgtgagggagatggcaacaccctcctccctcggaacagacgcccggcaatcaagccacctcctctcgctcccacaccaggtccgtgtcacaaaatagcctacttttaacttactccagccctctccctacaaacacacccccccaccacgttgacgcaccaacgcgcacccgaagtcccgcctccaactcagcgttcgggggacttgttctctaggtccaggatcttcctaatgcatcgcctcagccatgaacaacgcggagttctttaatacccgtgagcagcagcccaggccccttgaagagtgcagactcccacctggcctgggtccgtaggcctcgctccacccgctgtttacttatcccaagtctggaacccacggtggcggggggaagggtgaggaaagagaacgcaggggaatgacggatgggagggggaagggcgggctgcttggggtcgcgcaaatccgtcacgtccggggctttctctggcaaccgcgcgagcgttccccgcaacacagacccaggacaggaggggcaatggaatattccattgcgccctaggtgctggggaggaaacaggcggagcgatccatttaggccagtggggagaggaaaaagcagcaaacatattctgggaatggaaagaaggcctctccaggcttcgttgcccccagcgacccgaaagtccgatttccccgccttgattctccccacttcccaatacaggcgtctggctccgcagcagaacacgaagtttgcattccccaaggggcggccagggggcggaccagggaaaggtagtcctctgcattttgccgtgtgctgggtgagtggcagggtggcctggagggctgatgccagcccgggcgtgcccctcaacacccaccccaccccaccctccagtccgccccaggtcagcgacttacaactcttcattctgaagtgcgtgtagtgcccttgtctccagagacgcagagagtcctcgaggccccttgagctaagtgcagcctggcccagtttctcctgccctactctactcccctccctataagcgacccaccctcaaggggcggagggcgcgtagggatgcgctgactcatgcccgcgtaatttcgaccagtctttcaacctgaacgacccccagaatctggctgtctgagttatctgtgggtggctccctaccgaaacccccaggcgccccacctctccgcctgtgacccctaaccgacaccctagtgcctcagggcttttacttgctagggcttttacttagcatttaaagacgtttctctagagataaggatttctcagcatgtctgagcccctctctctgtttacaaggtcattgcttggtctaaatttgtctcaatcaaaacatttttgcgctcagaatggtgtagagtgacgatgaggtggcggtaaggggttgagcgctcacgcgaacgcctaagtgaccagaacgactggtgtgaagccgtgatctgactctgtggagcctgggactggtttcagcgagagcctctgtactgctctgtagtctctgctaggacatggacgaaaagggacgcagccgggagagcgactgccccaggtgggggctggggggacgtaagggaagaataatgattatctggctgtgtttttgtttaaaaaaaaaaaaaaactggtgtaaatctccatagacttcctatcctcgctcccttcacccacccacgcgctcccaagatgcaataagcaaataaaaagactaataacgctgtactgcaggtcgactcaggagctggagatgcgtcttggtgggaggtggtgggtgggagtaggggggtttagggaatggatctgaacattgaccagcccagagactctaagcagcctcaaaagcaaagggaaagtgggggaacaagcacacattaccaacagagctgccagaaatgagcagttaagtcataccccctaccccctccaaaagagcttcagctccttagtcctggacgaagaaggtatgtatgcacaccgcccaaactctctctcccttttccctccaaggcccagctccccctgatttacagacctgggcctccctctttactgctaggttggtaggttcaccaaaccctgggaacttttcagaccatcgcagttctgaactctgcacaattctctctcacacacaagtatttatctcttctaaagaggaggaaactggggccaaggatttgggagaagaccctggcaccttgcagggagctaagagggggagacgacctgcctctggaggcacctgggttattaactccactgagaacctgttcacttcctcccacaatacaatcactgagtcttggtgggggagactccagagagttctccttccttcctttccttagtcccacccgcctcgcctggtctagcctccgtgtttccatgacaactccaaaggagcccaaactgggggcttgaatgccggggtaagaggaggagagaggtggtccgagagcagagagagaccgagtgggaaacatctgaagcgctccccctccctcgcctcggtccctttaagctccccccctccccgctctccctccgcccgccccccccgccccccccccccgccgctgccttcatctctccatctctgcgctgctgccgctgcgccatccagcacccagactccagcaccggccgaggacccccactccggctgcagggaccctgtcccagcgagaccgcaggcatgtcatccgaaaagtcaggtaaaaacaataacaaaacctcccaccccctccactgtctccagactctccgtcccccttgccccaaccccctcccttacccctcctcagctgtggttctatttcattccccttctctccagctctcaacactcccccagtccccctcctctttctgtctccccctttctcttcctttcctctttccagtggcagcctctgccccttgccaacaacatggtcaggggggtaggttgagagggtgaaggaggtacagccaggttttgcagggatggcatcattgggagtgacagatggacaatcactggctggcatggagacatcctgtgaggaaatatggagacatgaccagatgggggttgtcaagggagcaaaatccagagggctcttcttaatctgccctaaaagaggtcccgagattctcacagaggctggggcactcctccccccactgaaggaacagcagagtggaacacatgtcatcccacatgtgtttatacaactgttgaattgagcacatattaacacagggttgcatgtctacgcatacgcacacacaggactagctcggataggccagcccaaaggcagctatagcaaaggagaggggattaggtctgcaggtgagagctgggtgcatggtgatgaaaaagacagaaaagaagcagaccagagttgtgacctcaaaactagattggaaggaagaaggaggggggcagatggcctagatacagcccctctcttgcccctcaaattagagatggtttctcacccgtctctctctatgtgtctctcccattatctttctccatccctgaccggctgtgtttccccttaccccctcctcaactcatcactgtgtcatctttcctcttatactctcctccactcacctcccccaggactcccagactcagtccctcacacttctccgccgccctacaatgcccctcagcctccagccgaacccccagccccaccgccacaggcagccccttcctcacaccatcaccaccaccaccactaccatcagtctggcaccgccaccctcccgcgcttaggggcagggggcctggcctcttccgcggccaccgctcagcgcggtccctcctcctctgccacgctgccgaggcccccccaccacgcccctcccggccctgctgccggggcacccccacccggctgcgctaccttgccccgcatgccacccgacccttacctgcaggagactcgcttcgagggcccacttcccccgccgccgcccgctgccgccgccccgcccccgccggcgccagcccagactgcccaggcccctggcttcgtggtgcccacgcacgcggggactgtgggcacgctgccgctggggggctacgtagcgcccggataccccctgcagctgcagccttgcactgcttacgtgccggtctacccggtgggcacggtgagtgccgggcagacagggacatgggaaagagggggacgcgatacaggacttgaaattggggatacgctgggggctggtaggatagaggaacaagggcagggaacaggtagtgttcccgggacaagccctagaaagaagggagcctgagacaggaaggactagggagagacacgggagtaggagtctactggtgcccagagtcagggcctgggagggggatcggagcctagaggttcagaggaggtctgaaagtaggaaaccgcctggcgggggacggggggaatggaagctgggaaccaagagggatgtgggagaagcctgggactaagggggtaggggaggcctggtaggtgtctggagggaagaaagaaggtctgacctgaggccaggacagccccagtgggaccataccttgcgggagagaatgtagaaagcccaagaatatggtggttaatgaagcaaggaagggaggagaggggcttaggtggaatttatgggtgtcctggaagggtaatgggtgctttattttgagaagccataggtaaaaattgtgcttttaaagccactctgccagccgcccaacgctggtaggctgggagagggtcagagtgatgcccctgccccccaaatttccttccacagccatatgcaggcgggaccccggggggaacaggagtgacctccactctccccccgccgccccagggcccagggctggccctactggagccgaggcgcccgccacacgactacatgcccatcgcggtgctgaccaccatctgttgcttctggcctactggcatcattgccatcttcaaggccgtgcaggtagggggcaggggcatactcggtttgggggcggggacagggagttctgggcgttctggggaccatcttagagaaaggctgaggcgttcgaacgaggccgcagctctttgacctccttcccccacccctcctccgtaggtgcgcacggccttggcccgcggagacatggtgtcggccgagatcgcttcacgcgaggcccggaacttctccttcatctccctggccgtgggcatcgcggccatggtgctctgtaccatcctcaccgtagtcatcatcatcgccgcgcagcaccacgagaactactgggatccctaaaaacgcccctggtccggccccactctgcgcccctcgatctcccaggctctttctgcagtcataccgcggacccaatgggcgccctgcacacccgtttctggggccgtcagacttggatacatcgtaaactccgcctccacggaacgtctcgccttgcgagcaagctcggaatccagttcctcaggaacccctccaaaacccacacccccagggacgccgctttccgggatcccggccaaacgccggaccctcagtcgctccaggccccctcaccctcaaagtgtagcgcccccaaccgagcaacctcggtttggtccctaaaaccccgcctcctctataagcaccgccccagctctgacaaaaccccgcctccaggtcggcaggctccgccttcttttcttctccgcggggtgattcagtccagtgattgggtttgtggctccaggcctcgcccacagacggacagacccctccctttcttccggcaaaaggaccgagccctggggtagtaaggcccccacactcctgttttttgcaagtacatttttgtccctcctccacccaggtatctgcctattttcttgctaatcccagaacctttccttttgctttttttaaggacatttgggaagttcctggtgtaggacccttctccctgggataagaaacctgcctgtaaacgctctgtaaatactcccttccacccatcccagcccctgggcagccgggcagaagggaatccaggctatggacctcccaagtccccgctccccgctcccctcggcggccccgccttgttctgatctgtgtgtgagtgtgtgtgaacttctgaaagacaatattaaagagacttagttgatttatcgcccgcaattccaaagactgcggccccgcaaagaccctccccacttttgattccgcctttcacttcccttcatctcctcttccaaggaaaaaaaaagaaaacccgacagagactaacgtgagggacacagattcccagatcgccagagagacacgtgaatatgggggacggaggggagctccctgggaatccaccaaggaagaccttggggtccattctcagtgaggctttattttcttagtgaggctttatttccccagtaccccttttccattccctactatccccagaactccaggaagacaagagaacagagagggcagaccatggtgaagaagctggtcaaggatagagtgatgggggccaagaagagatgccagctgcccatagctgttcctgactgtgggctggagggtggcagataacttggattagagccccacatgctggactgtagggggtataggaaaggcaaagagagcagattgctgtgggagcccagggaggaggtcaatggcctctcaagtctccctgggactagttgccctctcctatcctgaggtcaaccaataggcctcttttctgaggggagtggtgattaggggatgctgccagcagtgggcttgggtctttggttgtacacccacaggacagggtcctaacctaatttatgcatttatgcaacatgcagactccatgctggatgctggtgagacatccacccagacagcaggtgtgacccctgacctcatggagcttacaatctagaagggaagccatgcactgagataggaaatgtgataggagatgtgggaggagggtggggtgaggtgtgaatatcatgggttcgcccttggatgtttcgcatttaatgtgcctaccttaccaaacttcttgaaaaacagaattcacggctgggcacggtggctaacacctgtaattccagcactttgggaggccaaggcaggcggatcacttgaggtcaggagttcgggaccagcctggccaacatggtgaaaccccatctgtactaaaaataataaattagccgggcatggtgacgggcacctgcagtcccagctacttggaaggctgaggcaggagaatcgcttgaacttgggaggcggaggttgcagtgagccaagatcaagtcattgcactccagcctgggcaacaagagcgaaactccatctcaaaaaaaaaggggcaggggggtgcggaatattgctatcagagatatgtctgtatctgtctttttttcatacccactatttcttgacttattggaatatgcatccacaccctattctcctgaaacctccctctcaaatggcaaccaattacccagatcccaaatcaatggcattttcacagtattctgcctctctaagccctcccatgtttgtcccttgaccctgaattccccacatacccaggttcaagaacgtattacctcccttcccccgacacacacacagacctctaaccattccgcctctgccttccctccttgctttttctcctcccttcccctaagtgtccatctctgattttttttccttctctgagactttcctttgaaaagctcattcactcaactcagctaatcaaatgcttttccaacctgtattttacatgcagacgttttttccagtgcctgaagatcatagccacatggaagatgcttgctggtcctctaaaatcaacacattccaaaacaaactgatgaaatgccacagaaaacctgcttccctgtctctgttaatagaccattttcccaatcactcttccttatctagaaatttgccgcctcctccctctccctcctgccttatttttggtgtgctctcaagcctagtcagttctgccaccacaatgtcttttgaatctgtaatttttccccagcccttgctggaaaaattacctcattaggattattgcatcagctttcccaacaggtctccctacttcctacttctccctacctcaagtctccctccacactattgtcagatcagcctccctaaacacactttcataactccactgctcaaaagcccttcaaggttccctattgcctactcaattatttacaaaattttaatctggcctttaacaccttccataatttaaaatcatccagcttctctgttcattctaatttctaaccatactgaattactcatcattcccacctccaggtatttgcccagctgttcccaaatcttagacctccttcccaaatctctgcctattataaaccaaattgtttgcagcttgtcacaaatttcagaggctttagaccacatctaggctcttgctcatgatgttctccccctcttgacatctgcctctctacttggtcaaattttatttacaatatctttcaaagtccggatcaattcatccctcactgtagcaaaaaggtgtctctctttcctctgggttagattaaagcagtgggtttccaaacagagcttcaggcattccttggagcaacggttcttaccccaggttacacattagaatccactggggagcactgaaaaatctgaaagcccatgtcgcatcctaaaacaattaaatcagaatctctgggctcagtgccagtggctcacacctgtaatctcagcactctgggaagtcgaggcaggaggatcgtttaagcccaggagttcgagactagcctgggcaatatggtgagaccccatctctacaagaaagtttaaaaactagcctaggccagatcgagaccatcctggctaacatggtgaaaccgcgtctctactaaaaatacaaaaaaattagctgggtgtggtggtaggtgcctgtagtcccagctactcaggaggctgaggcaggagaacggcatgaacccgggaggtggagcttgcagtgagccgagatcgtgccatgcactccagcctgggcaacagagcgagactccgtctcaaaaaaaaaaaaaaaaaaaaaattagcctaggccgagcgcggtggctcacacatataatctcagcactttgggaggccgaggtgggtggatcacctgaggtcaggcgttcaagaccagcctggccaacgtggtgaaaccccgtctccactaaaactgcaaaaatcagccgggtatggtggcacatgcctgtaatcccagctactcaggaggctgaggcagaagaatcgcttgaacctaggaggcggaggttgcagtgagcccagattgcaccactgcactccagcctgggtggcagagaggcactcagtctcaaaaagaaaaagaaaaaaaaaatttagccgagccccatggctcacctgtagtcttagctacttgggagggtgagacgggaggattgcttgggcctgaggggcagaggcttcagtgatcagaacacggtgctccagcctgggcaacagagtgagaccctatctcaaaacaaacaaaaaagaatctctgggggtggaactctggcatcagtatttaagacataaccaggtgattccaaagggcagccaaggttgggaatcacaggtttacagacactttaaggaccacccagggagaatggaaaggccaaaaaatgacttcaacccgggcaattttctttaggagaaaagtatctagatctaagattcatgttatctgcatattttctcatctcttcccacctgatatcttgacatacacagtttaccttgtgagctacttgaaggcaagagtcaaatctggcttatctctgtttttcagatcctcatcagataaaacctcctctaccaatctttgaactcaattgaattgaaaggaatcaggcaaagggagagatgaataaaaaatgacttagctttcttttgcttttccttaggaatgtttgtttcttaatctcagatctcttaacctcacccagactcctccctcatgaggaaataaaatgttacaatgtgtggccgggcgcggtggctcactcctgtaatcctagcactttgggaggccgagatgggcggatcacgaggtcaggagatcaggaccatcctggctaacacggtgaaaccccatttccactaaaaatacaaaaaattagctgggtgtggtggcaggcacctgtagtcccagccacttgggaggctgaggcaagagaatggtgtgaatcccggaggcagagcttgcagtgagccgagattgtgccactgcactccagcctgggcaacagggcgagactccgtctcaaaaaaaaaaaaagttacaatgtgatcctcttcctatctgactcacctccctctgcaggtgatacccttggctgtggcacctctactgacagagactccatcctctaggagaggctctgccctcccataacatctgtatgggtgctctcatacagatgggggaaaaccatgattagattctgggtcatcattccccctctacaatggaagattcagcacctgatcactctacttccaccgctcatttcattttcttctttttattatttatttatttatttttgagatggagttttgctcttctcgcccaggctggagtgcagtggcgcaatctcgtctcactgcaacctccgcctcctgagttcaatagattctcctgcctcagccttagtaggtgtgattacaggcatctgccaccacgcccagctaatttttgtatttttactagagacagggtttcaccatgttggccaggctggtcttgaactcctgatcttaggttatctgcctacctcggcctcccaaagtgctgggattacacacgtgagccaccgagcccagcctctttttcttttttcttttttttctgaggcagggtctcgctctgtcacccaggctggagtgcagcagcaggatcatagctcactgagcttcgatctcccggtctcaagtgatcctcccagctaattttttttatttttattttattttttttttttgagatggagtctggctctgtcgcccagactggagtgcagtggcacaatctcagctcactgcaaccttgcctcctggattcaagcaattctctgcctcagcctctgagtagctaggattacaggcgcctgccaccacgcccggataaattttgggtttttttttttttttttttgagacagagtctcaccctgtcgcctagcctggagtgcagtggtgcgatctcggctcactgcaagctctgcctcccgggttcatgccattctcccgcctcccacctcagcctcccaagtagctgggactacaggcacccgccaccatgcccagttaattttgtttttgtatttttagtagagacggggtttcaccgtgttagccaggatggtctcaatctcctgacctggtgatccgccctcctcaccctcccaaagtgctaggattacaggcttgaggcaccgcccctggcctgtttttttgttcgtttgtttttgttttttttggacggaattttgctcttgttgcccaagctggagtgcaatggtgccatctcagctcactgcaacctctgcctcccaggttcaagcgattctcctgcctcagcctcctgagtagctcggattaccggcgtgtgccaccatgcccggctaattttttgtatttttagtagaaatggggtttcaccatattggtcaggctggtctcaaactcttgacctcgtgatccacccgcctcggccttccaaagtgctgggattacaggcataaaccactgcgcctggcctctggcctttgatatttaatagagatgaggtcacactgtgttgcccaggacagtctcgaactcctgaattcacacaatctgcctgcctcagcctcccaaagtgccgggattataggcatgagctacagtgcctggccccgttttattatttttgttttcaatgttcatgcagattctctagcaccctgcccttctcttgcagtgatttatttctccctgcttccctctcgccctatgtcataccttcaacttggttgccaccaatacctactgcccttctaaaatctcatcctcagtcttttcatgttgctccccagtacccctatcccaaaaattcttcaaccccatctgggcctcccatccactaacttacttttcattgtttgatctcaattcttcactttcctcattacccagtttagattccaaggttcaacacggtaatcgcctctcagccctcaccctgtactcctggccccccttcctctggcacattttatccctggtcaaatcccactctgcctgctccacacctgcattcaacagctggggagaaacacacagtcatactgactggtcttgcttcctgcgggccctcagtgtggcatgccagctcgcctttccctactcagttcacattccccaaatctgagaccacaacttcacaagatgatgacttttcttcctatttcagtgagaaaacagaaactttcagaagggaacttcctcatgttcccaccccaaattcaccagtctacctgcaactctaccgcagagaagctgacatgcacccacctgccacctcatctgtaccccgggatcctgttccctctcacctgctcagagatgttattcctgaaattatcccctatctctctctctctcacttaatcagtttacccctctgtactgcaacactcccatcattatgcaaacatgctataaaattatacttcatctctgaaaagaaagaaaaaaactgtttcgctactcacctaggtagtaaaagcacaacattcagagaatggtgcttaccctttggcagaaaagcaatctggaaagggaaattcagggagccttaactatactggggaagattttacctcttgtttttgctttcttttttttttttttttttttttgagatggagtctccctctgtcacccaggctggagtgcaatggcacgatctcagctcactgcaacctccgcctcccgggttcaagcgattctcctgcctcagcctcccaagtagctgggattataggcacgcaccaccacacctggctaatgttttagtagagacaggatttcaccatgttagccaggctggtctccaactcctgacctcaggtgatccgcccacctcagcctcccaaagtgctgggattacaggtgtgagccaccttgccctgatgggaagattttacttcataagctgcctgatgttcacaaaattattctttgtaatacatatatatttatgcatataaattataattttatatgtataaaataatgcatttatttttaaatttaaaaactcttccctgacccagctcactccctcagtgttccacttctctctccacttaacaaaacttctcactgcctctactttctcacctctcattcactcttgaatttctctcaatcaggctctcatccccaccactttacttaaaccacatgtcagagtcacaaatgacctccaagtttctaaacccaatggtcaagggtcagtttgtggcaggccaattctccctgacagtcacacagacaggcctgcatagcaccccagttacacagacagatttccacagcattgccttaacattgagcaaatagttaaacctaggggaattggtgtacagacatcaaagctagaaatgaaacacatggtgagtaagagccttgcatgggcttctcccttgctggagcaagtcaaaataacagagacagccttacattcctagtgccaggactcgtctcgggtcgacgatatctgagacaagtcaaggtaacagaggcagctgtttgaatagattcactggacaatctaaggcagctctccgcaccaagctgtaaaggagataagatagaaataatcactctggtaccacagtaaacaggccttgaaggtactggggccctcacagcttaatcagacttagcaagaatttttttgcctctgaccctctagttgaaacaaaattagttactgatagactttggtgaatgccatactgcatgtaggcatataacctaaacctgtataaacactaagaaaatagtaacactggccgggtgtggtggctcacacctgtaattctagcactttgggaggccgaggtgggtggatc

SEQ ID NO: 2258 - DNA, 375 bp, Homo sapiens; identical to SEQ ID NO: 391
  misc_feature: n=a,t,g or c

SEQ ID NO: 2259 - DNA, 198 bp, Homo sapiens; identical to SEQ ID NO: 490

SEQ ID NO: 2260 - DNA, 297 bp, Homo sapiens
atagcaaataataaatttattaggtgcctacaagtacaaaatactgaaagccgctgcaggggattataaagatgtgtaagagacaagccctgccctcaaagagcttacaatctaggcaattagtcacacaaataagttgtgatggcgctctaagtgacctcagcagagttcttgaaaatgttcatatccttcaaattcttctcttgtcaaattaaacagtgggaaagagaacttttgtggcattcactggtgaccctgactctgcttgcaagcatctttctgctgttgcacgttgtc

SEQ ID NO: 2261 - DNA, 367 bp, Homo sapiens
ttttgttcaataaatgtttattgctttttcaattattctatttacaaacaacatggaatttcttggcctcatgatacaaagcgatactaaactgtagtctagcagtgtaggcaacatcatgggaaccagaaaatggccaggccttttgcactagccaacactttccagttgaaaatactattttacacatatagaacacttataaaatgcacttgcatgtaaacactgtaaaatcctgccatttaaaattctacactcaaaaagctctaagtacatcaaaaaatagaagaaatttctaattgataccaataaggcattttaaaactacaaacagctttctttattcaatttcaaagctaatactctg

SEQ ID NO: 2262 - DNA, 343 bp, Homo sapiens
  misc_feature: n=a,t,g or c
gttttcccttnactttatttatcttcataagtcacaaaatgtgagtgcagagataaatgtctgtgtgcatgtgccctgagcnacagggtggcataactcggcacactcataatgacacagccgttcacccagccacagatagtgacagggcacacatggcgacacccacatgtacggagataaatctcccccaccatgacatgggtagacagaaaacacgccgcagtatactctagtatgtttacacaaacagggagacaggcccgtgcaatgcatgtcaccaccacccacantcagnggttgacatctgcttgggggttcttcngacaaaggccaccccacc

SEQ ID NO: 2263 - DNA, 402 bp, Homo sapiens
  misc_feature: n=a,t,g or c
ttttggcttttaaaggaaacaatacggtttgctagaaaaacctcaaaaaataatgattatatacaaaatggttatctgaatgtggattctgtactgcagcagaagcaacccagctccggaactctatttgcgcttcctcagtatcaggtacatcatgccgctgatgaaggtgcaggcgaaggcacccacgccagggatntaggagtagccgtagctgccttctctggtcacgggatagaatttcgcgtttttgtcgtgaatgtcttcacgcctgtctgtataaatgggaggccgcaatcatgacacacagacatgacattaggctgggatgatggaaggttangggcaaancctcttcttccctgctttcaaggcnggaaagaaccttggancaccgaagga

SEQ ID NO: 2264 - DNA, 517 bp, Homo sapiens
ttttttttctggttttaaactttattttccatgtacagtttcagattatacaaaacatagaaaatggactattttaaaggtacattaagtagaaagtttctaactaccctaaagtcacaaaccaagattcaaaatgaacctctaggccttgccctaacatttccccaacaccacaaaattgtccaacttgctctattgtaagtaacctttaaactattagcgagtttagtaacatcccgcgaggcagattttaaactacgatacagtttctatctaggccactgtgtttagtgtgtttacaaacaggcttggagttctaggtttcttcatcatcagtgaacacagagcgtcctagagcgccacgctgttcatgaggggtgtccacaaaagcacgcaaactatagcagagtgtgtgggagtgaataggtctccgatgttcctgtattcaggtatatatatatacacattcacacagaccaacaagtcaagcattctccaaactcatttgaacagagac

SEQ ID NO: 2265 - DNA, 195 bp, Homo sapiens; identical to SEQ ID NO: 404
  misc_feature: n=a,t,g or c

SEQ ID NO: 2266 - DNA, 308 bp, Homo sapiens; identical to SEQ ID NO: 412
  misc_feature: n=a,t,g or c

SEQ ID NO: 2267 - DNA, 504 bp, Homo sapiens
  misc_feature: n=a,t,g or c
tnnannnaannaaagagntcagcctttattgtgggctcagaagggcacaagagcagaacatgcagaggactggcagcactctggcctggcatcacnanggagngcagcagcaggcacccatgcagctcagcagcctcacttgctgcacttcctgggggagcatttgcactccatggcattgagaacctcatggtacacaacagagccattggtgcagtgcagggccacctcatnggggctccgtccgtntcggagagcagcaggagcactggtcctgcacatcgttgatgtcaatgggagtacatggcttttctgggcacattttgccctgggcagttagtgggatatccaccttnttactttcagactttacagctttccccaccttttgacatacttgcagcctgggcagttnattttcgtttncacttcaggcttcctcacatgtnttcacagcaggtncctgggntttttcataatttttacctcccttnaggccagaca

SEQ ID NO: 2268 - DNA, 690 bp, Homo sapiens
cagcacatcccgctctgggctttaaacgtgacccctcgcctcgactcgccctgccctgtgaaaatgttggtgcttcttgctttcatcatcgccttccacatcacctctgcagccttgctgttcattgccaccgtcgacaatgcctggtgggtaggagatgagttttttgcagatgtctggagaatatgtaccaacaacacgaattgcacagtcatcaatgacagctttcaagagtactccacgctgcaggcggtccaggccaccatgatcctctccaccattctctgctgcatcgccttcttcatcttcgtgctccagctcttccgcctgaagcagggagagaggtttgtcctaacctccatcatccagctaatgtcatgtctgtgtgtcatgattgcggcctccatttatacagacaggcgtgaagacattcacgacaaaaacgcgaaattctatcccgtgaccagagaaggcagctacggctactcctacatcctggcgtgggtggccttcgcctgcaccttcatcagcggcatgatgtacctgatactgaggaagcgcaaatagagttccggagctgggttgcttctgctgcagtacagaatccacattcagataaccattttgtatataatcattattttttgaggtttttctagcaaaccgtattgtttcctttaaaagccaaaa

SEQ ID NO: 2269 - DNA, 379 bp, Homo sapiens; identical to SEQ ID NO: 376

SEQ ID NO: 2270 - DNA, 305 bp, Homo sapiens; identical to SEQ ID NO: 472

SEQ ID NO: 2271 - DNA, 551 bp, Homo sapiens
caacaacaaaattagtagacatccaagaagcacatattaggaccaaagatagcatcaactgtatttgaaggaactgtagtttgcgcattttatgacatttttataaagtactgtaattctttcattgaggggctatgtgatggagacagactaactcattttgttatttgcattaaaattattttgggtctctgttcaaatgagtttggagaatgcttgacttgttggtctgtgtgaatgtgtatatatatatacctgaatacaggaacatcggagacctattcactcccacacactctgctatagtttgcgtgcttttgtggacacccctcatgaacaggctggcgctctaggacgctctgtgttcactgatgatgaagaaacctagaactccaagcctgtttgtaaacacactaaacacagtggcctagatagaaactgtatcgtagtttaaaatctgcctcgcgggatgttactaaactcgctaatagtttaaaggttacttacaatagagcaagttggacaattttgtggtgttggggaaatgttag

SEQ ID NO: 2272 - DNA, 395 bp, Homo sapiens
  misc_feature: n=a,t,g or c
tcagaaaactaaagcagcacctttattttatacatacaaacagtataaaatgtttattaggtaagagctgtgttttgtttacaatatattatattgcttcaagccaatgcaaaaagttcatacattatattccctatttcattgtgtttagaatatattatattgtttaaatgccantaccacagtgtaatttttttttttttaatactgaatctctggaataatggtaaggtcaaaatatattgtattgagagtttaaaaattaagagcaatttttaaaaatgtaacaaacatctaaatatctgacaataaaatctgaaatgctgtaacttcaacattaactgcaccatccaaattcttgtgacttacgcattttgccccatttaacctttctg

SEQ ID NO: 2273 - DNA, 357 bp, Homo sapiens; identical to SEQ ID NO: 385

SEQ ID NO: 2274 - DNA, 1410 bp, Homo sapiens
cggaattagggagatagttggtattaggattaggattgttgtgaagtatagtacggatgctacttgtgcaatgatggtaaaagggtagcttactggttgtcctccgattcaggttagaatgaggaggtctgcggcttggagctcctggggcctaacaaaaagaaacctgccatgctgctcttcctcctctctgcactggtcctactcacacagcccctgggctacctggaagcagaaatgaagacctactcccacagaacaacgcccagtgcttgcaccctggtcatgtgtagctcagtggagagtggcctgcctggtcgcgatggacgggatgggagagagggccctcggggcgagaagggggacccaggtttgccaggagctgcagggcaagcagggatgcctggacaagctggcccagttgggcccaaaggggacaatggctctgttggagaacctggaccaaagggagacactgggccaagtggacctccaggacctcccggtgtgcctggtccagctggaagagaaggtcccctggggaagcaggggaacataggacctcagggcaagccaggcccaaaaggagaagctgggcccaaaggagaagtaggtgccccaggcatgcagggctcggcaggggcaagaggcctcgcaggccctaagggagagcgaggtgtccctggtgagcgtggagtccctggaaacgcaggggcagcagggtctgctggagccatgggtccccagggaagtccaggtgccaggggacccccgggattgaagggggacaaaggcattcctggagacaaaggagcaaagggagaaagtgggcttccagatgttgcttctctgaggcagcaggttgaggccttacagggacaagtacagcacctccaggctgctttctctcagtataagaaagttgagctcttcccaaatggccaaagtgtcggggagaagattttcaagacagcaggctttgtaaaaccatttacggaggcacagctgctgtgcacacaggctggtggacagttggcctctccacgctctgccgctgagaatgccgccttgcaacagctggtcgtagctaagaacgaggctgctttcctgagcatgactgattccaagacagagggcaagttcacctaccccacaggagagtccctggtctattccaactgggccccaggggagcccaacgatgatggcgggtcagaggactgtgtggagatcttcaccaatggcaagtggaatgacagggcttgtggagaaaagcgtcttgtggtctgcgagttctgagccaactggggtgggtggggcagtgcttggcccaggagtttggccagaagtcaaggcttagaccctcatgctgccaatatcctaataaaaaggtgaccatcaaaaaaaaaa

SEQ ID NO: 2275 - DNA, 2535 bp, Homo sapiens
gcagaccgggcgtcgggtgagcccagaagtgagagcagttggctgtgccccagtgctgtgtgacccagaggcgccgctcaccctctctgagctggtggacatcatagcgggtgcagcccaaaactgtcttctgaggaagaggtgctctcctgggcccccactgtccccaggcctcagatgctgcatattgctggcccagctcctgaggctctttggacctccaggaatcggtgtctctatcaggaacccttaaccctgacccggactcccagctgggacccggggtgtcggagtggcaagagcgctgtcaggcctggtgaagggtgtgagctgtccaacggggcagggaggaggcagggcctgttctgcagttggacagacagagccctctagctgctttctggaagactgaagggcagcaaggcaagtgaggtgctgccgtcatccaggctggacagttcagtgatttgcctgaggccccacagcaggagaacgagaaggctgcctgatcagagagtccctgaagaagattctgtggctacaggcttcagcagagtgtgagggagaccccggttatttcctcagctatttccaccaaatcctcctgtctttcgtggccaacaccccaggcaaggcttggggcccccgtctgctgctggacgcagagccatgaagaagaagttagtggtgctgggcctgctggccgtggtcctggtgctggtcattgtcggcctctgtctctggctgccctcagcctccaaggaacctgacaaccatgtgtacaccagggctgccgtggccgcggatgccaagcagtgctcgaagattgggagggatgcactgcgggacggtggctctgcggtggatgcagccattgcagccctgttgtgtgtggggctcatgaatgcccacagcatgggcatcgggggtggcctcttcctcaccatctacaacagcaccacacgaaaagctgaggtcatcaacgcccgcgaggtggcccccaggctggcctttgccaccatgttcaacagctcggagcagtcccagaagggggggctgtcggtggcggtgcctggggagatccgaggctatgagctggcacaccagcggcatgggcggctgccctgggctcgcctcttccagcccagcatccagctggcccgccagggcttccccgtgggcaagggcttggcggcagccctggaaaacaagcggaccgtcatcgagcagcagcctgtcttgtgtgaggtgttctgccgggatagaaaggtgcttcgggagggggagagactgaccctgccgcagctggctgacacctacgagacgctggccatcgagggtgcccaggccttctacaacggcagcctcacggcccagattgtgaaggacatccaggcggccgggggcattgtgacagctgaggacctgaacaactaccgtgctgagctgatcgagcacccgctgaacatcagcctgggagacgcggtgctgtacatgcccagtgcgccgctcagcgggcccgtgctggccctcatcctcaacatcctcaaagggtacaacttctcccgggagagcgtggagagccccgagcagaagggcctgacgtaccaccgcatcgtagaggctttccggtttgcctacgccaagaggaccctgcttggggaccccaagtttgtggatgtgactgaggtggtccgcaacatgacctccgagttcttcgctgcccagctccgggcccagatctctgacgacaccactcacccgatctcctactacaagcccgagttctacacgccggatgacgggggcactgctcacctgtctgtcgtcgcagaggacggcagtgctgtgtccgccaccagcaccatcaacctctactttggctccaaggtccgctccccggtcagcgggatcctgttcaataatgaaatggacgacttcagctctcccagcatcaccaacgagtttggggtacccccctcacctgccaatttcatccagccagggaagcagccgctctcgtccatgtgcccgacgatcatggtgggccaggacggccaggtccggatggtggtgggagctgctgggggcacacagatcaccacggccactgcactggccatcatctacaacctctggttcggctatgacgtgaagcgggccgtggaggagccccggctgcacaaccagcttctgcccaacgtcacgacagtggagagaaacattgaccaggcagtgactgcagccctggagacccggcaccatcacacccagatcgcgtccaccttcatcgctgtggtgcaagccatcgtccgcacggctggtggctgggcagctgcctcggactccaggaaaggcggggagcctgccggctactgagtgctccaggaggacaaggctgacaagcaatccagggacaagatactcaccaggaccaggaaggggactctgggggaccggcttcccctgtgagcagcagagcagcacaataaatgaggccactgtgccaggctcaggtggcctcctggcctttcc

SEQ ID NO: 2276 - DNA, 73308 bp, Homo sapiens
gaattctaatctccctctcaaccctacagtcacccatttggtatattaaagatgtgttgtctactgtctagtatccctcaagtagtgtcaggaattagtcatttaaatagtctgcaagccaggagtggtggctcatgtctgtaattccagcactggagaggtagaagtgggaggactgcttgagctcaagagtttgatattatcctggacaacatagcaagacctcgtctctacttaaaaaaaaaaaaattagccaggcatgtgatgtacacctgtagtcccagctactcaggaggccgaaatgggaggatcccttgagctcaggaggtcaaggctgcagtgagacatgatcttgccactgcactccagcctggacagcagagtgaaaccttgcctcacgaaacagaatacaaaaacaaacaaacaaaaaactgctccgcaatgcgcttccttgatgctctaccacataggtctgggtactttgtacacattatctcattgctgttcgtaattgttagattaattttgtaatattgatattattcctagaaagctgaggcctcaagatgataacttttattttctggacttgtaatagctttctcttgtattcaccatgttgtaactttcttagagtagtaacaatataaagttattgtgagtttttgcaaacacagcaaacacaacgacccatatagacattgatgtgaaattgtctattgtcaatttatgggaaaacaagtatgtactttttctactaagccattgaaacaggaataacagaacaagattgaaagaatacattttccgaaattacttgagtattatacaaagacaagcacgtggacctgggaggagggttattgtccatgactggtgtgtggagacaaatgcaggtttataatagatgggatggcatctagcgcaatgactttgccatcacttttagagagctcttggggaccccagtacacaagaggggacgcagggtatatgtagacatctcattctttttcttagtgtgagaataagaatagccatgacctgagtttatagacaatgagcccttttctctctcccactcagcagctatgagatggcttgccctgcctctctactaggctgactcactccaaggcccagcaatgggcagggctctgtcagggctttgatagcactatctgcagagccagggccgagaaggggtggactccagagactctccctcccattcccgagcagggtttgcttatttatgcatttaaatgatatatttattttaaaagaaataacaggagactgcccagccctggctgtgacatggaaactatgtagaatattttgggttccatttttttttccttctttcagttagaggaaaaggggctcactgcacatacactagacagaaagtcaggagctttgaatccaagcctgatcatttccatgtcatactgagaaagtccccacccttctctgagcctcagtttctctttttataagtaggagtctggagtaaatgatttccaatggctctcatttcaatacaaaatttccgtttattaaatgcatgagcttctgttactccaagactgagaaggaaattgaacctgagactcattgactggcaagatgtccccagaggctctcattcagcaataaaattctcaccttcacccaggcccactgagtgtcagatttgcatgcactagttcacgtgtgtaaaaaggaggatgcttctttcctttgtattctcacatacctttaggaaagaacttagcacccttcccacacagccatcccaataactcatttcagtgactcaacccttgactttataaaagtcttgggcagtatagagcagagattaagagtacagatgctggagccagaccacctgagtgattagtgactcagtttctcttagtaattgtatgactcagtttcttcatctgtaaaatggagggttttttaattagtttgtttttgagaaagggtctcactctgtcacccaaatgggagtgtagtggcaaaatctcggctcactgcaacttgcacttcccaggctcaagcggtcctcccacctcaacatcctgagtagctggaaccacaggtacacaccaccatacctcgctaattttttgtatttttggtagagatggggtttcacatgttacacaggatggtctcagactccggagctcaagcaatctgcccacctcagccttccaaagtgctgggattataagcatgattacaggagttttaacaggctcataagattgttctgcagcccgagtgagttaatacatgcaaagagtttaaagcagtgacttataaatgctaactactctagaaatgtttgctagtattttttgtttaactgcaatcattcttgctgcaggtgaaaactagtgttctgtactttatgcccattcatctttaactgtaataataaaaataactgacatttattgaaggctatcagagactgtaattagtgctttgcataattaatcatatttaatactcttggattctttcaggtagatactattattatccccattttactacagttaaaaaaactacctctcaacttgctcaagcatacactctcacacacacaaacataaactactagcaaatagtagaattgagatttggtcctaattatgtctttgctcactatccaataaatatttattgacatgtacttcttggcagtctgtatgctggatgctggggatacaaagatgtttaaatttaagctccagtctctgcttccaaaggcctcccaggccaagttatccattcagaaagcattttttactctttgcattccactgtttttcctaagtgactaaaaaattacactttattcgtctgtgtcctgctctgggatgatagtctgactttcctaacctgagcctaacatccctgacatcaggaaagactacaccatgtggagaaggggtggtggttttgattgctgctgtcttcagttagatggttaactttgtgaagttgaaaactgtggctctctggttgactgttagagttctggcacttgtcactatgcctattatttaacaaatgcatgaatgcttcagaatatgggaatattatcttctggaatagggaatcaagttatattatgtaacccaggattagaagattcttctgtgtgtaagaatttcataaacattaagctgtctagcaaaagcaagggcttggaaaatctgtgagctcctcaccatatagaaagcttttaacccatcattgaataaatccctataggggatttctaccctgagcaaaaggctggtcttgattaattcccaaactcatatagctctgagaaagtctatgctgttaacgttttcttgtctgctaccccatcatatgcacaacaataaatgcaggcctaggcatgactgaaggctctctcataattcttggttgcatgaatcagattatcaacagaaatgttgagacaaactatggggaagcagggtatgaaagagctctgaatgaaatggaaaccgcaatgcttcctgcccattcagggctccagcatgtagaaatctggggctttgtgaagactggcttaaaatcagaagccccattggataagagtagggaagaacctagagcctacgctgagcaggtttccttcatgtgacagggagcctcctgccccgaacttccagggatcctctcttaagtgtttcctgctggaatctcctcacttctatctggaaatggtttctccacagtccagcccctggctagttgaaagagttacccatgcagaggccctcctagcatccagagactagtgcttagattcctactttcagcgttggacaacctggatccacttgcccagtgttcttccttagttcctaccttcgaccttgatcctcctttatcttcctgaaccctgctgagatgatctatgtggggagaatggcttctttgagaaacatcttcttcgttagtggcctgcccctcattcccactttaatatccagaatcactataagaagaatataataagaggaataactcttattataggtaagggaaaattaagaggcatacgtgatgggatgagtaagagaggagagggaaggattaatggatgataaaatctactactatttgttgagaccttttatagtctaatcaattttgctattgttttccatcctcacgctaactccataaaaaaacactattattatctttattttgccatgacaagactgagctcagaagagtcaagcatttgcctaaggtcggacatgtcagaggcagtgccagacctatgtgagactctgcagctactgctcatgggccctgtgctgcactgatgaggaggatcagatggatggggcaatgaagcaaaggaatcattctgtggataaaggagacagccatgaagaagtctatgactgtaaatttgggagcaggagtctctaaggacttggatttcaaggaattttgactcagcaaacacaagaccctcacggtgactttgcgagctggtgtgccagatgtgtctatcagaggttccagggagggtggggtggggtcagggctggccaccagctatcagggcccagatgggttataggctggcaggctcagataggtggttaggtcaggttggtggtgctgggtggagtccatgactcccaggagccaggagagatagaccatgagtagagggcagacatgggaaaggtgggggaggcacagcatagcagcatttttcattctactactacatgggactgctcccctatacccccagctaggggcaagtgccttgactcctatgttttcaggatcatcatctataaagtaagagtaataattgtgtctatctcatagggttattatgaggatcaaaggagatgcacactctctggaccagtggcctaacagttcaggacagagctatgggcttcctatgtatgggtcagtggtctcaatgtagcaggcaagttccagaagatagcatcaaccactgttagagatatactgccagtctcagagcctgatgttaatttagcaatgggctgggaccctcctccagtagaaccttctaaccagctgctgcagtcaaagtcgaatgcagctggttagactttttttaatgaaagcttagctttcattaaagattaagctcctaagcagggcacagatgaaattgtctaacagcaactttgccatctaaaaaaatctgacttcactggaaacatggaagcccaaggttctgaacatgagaaatttttaggaatctgcacaggagttgagagggaaacaagatggtgaagggactagaaaccacatgagagacacgaggaaatagtgtagatttaggctggaggtaaatgaaagagaagtgggaattaatacttactgaaatctttctatatgtcaggtgccattttatgatatttaataatctcattacatatggtaattctgtgagatatgtattattgaacatactataattaatactaatgataagtaacacctcttgagtacttagtatatgctagaatcaaatttaagtttatcatatgaggccgggcacggtggctcatatatgggattacatgcctgtaatcccagcactttgggaggccaaggcaattggatcacctgaggtcaggagttccagaccagcctggccaacatggtgaaaccccttctctactaaaaaatacaaaaaatcagccaggtgtggtggcacgcgtctataatcccagctactcaggaggctgaggcaggagaatcacttgaacccaggaggtggaggttgcagtgagctaagattgcaccactgcactccagcctaggcgacagagtgagactccatctcaaaaaaaaaaaaagaagtttattatatgaattaacttagttttactcacaccaatactcagaagtagattattacctcatttattgatgaggagcccaatgtacttgtagtgtagatcaacttattgaaagcacaagctaataagtagacaattagtaattagaagtcagatggtctgagctctcctactgtctacattacatgagctcttattaactggggactcgaaaatcaaagacatgaaataatttgtccaagcttacagaaccaccaagtagtaaggctaggatgtagacccagttctgctacctctgaagacagtgttttttccacagcaaaacacaaactcagatattgtggatgcgagaaattagaagtagatattcctgccctgtggcccttgcttcttacttttacttcttggcgattggaagttgtggtccaagccacagttgcagaccatacttcctcaaccataattgcatttcttcaggaaagtttgagggagaaaaaggtaaagaaaaatttagaaacaacttcagaataaagagattttctcttgggttacagagattgtcatatgacaaattataagcagacacttgagaaaactgaaggcccatgcctgcccaaattaccctttgaccccttggtcaagctgcaactttggttaaagggagtgtttatgtgttatagtgttcatttactcttctggtctaacccattggctccgtcttcatcctgcagtgacctcagtgcctcagaaacatacatatgtttgtctagtttaagtttgtgtgaaattctaactagcgtcaagaactgagggccctaaactatgctaggaatagtgctgtggtgctgtgataggtacacaagaaatgagaagaaactgcagattctctgcatctccctttgccgggtctgacaacaaagtttccccaaattttaccaatgcaagccatttctccatatgctaactactttaaaatcatttggggcttcacattgtctttctcatctgtaaaaagaatggaagaactcattcctacagaactccctatgtcttccctgatgggctagagttcctctttctcaaaaattagccattattgtatttccttctaagccaaagctcagaggtcttgtattgcccagtgacatgcacactggtcaaaagtaggctaagtagaagggtactttcacaggaacagagagcaaaagaggtgggtgaatgagagggtaagtgagaaaagacaaatgagaagttacaacatgatggcttgttgtctaaatatctcctagggaattattgtgagaggtctgaatagtgttgtaaaataagctgaatctgctgcctaacattaacagtcaagaaatacctccgaataactgtacctccaattattctttaaggtagcatgcaactgtaatagttgcatgtatatatttatcataatactgtaacagaaaacacttactgaatatatactgtgtccctagttctttacacaataaactaatctcatcctcataattctattagctaatacatattatcatcctatatttcagagacttcaagaagttaagcaacttgctcaagatcatctaagaagtaggtggtatttctgggctcatttggcccctcctaatctctcatggcaacatggctgcctaaagtgttgattgccttaattcatcagggatgggctcatactcactgcagaccttaactggcatcctcttttcttatgtgatctgcctgaccctagtagaacttatgaaatttctgatgagaaaggagagaggagaaaggcagagctgactgtgatgagtgatgaaggtgccttctcatctgggtaccagtggggcctctaagactaagtcactctgtctcactgtgtcttagccagttccttacagcttgccctgatgggagatagagaatgggtatcctccaacaaaaaaataaattttcatttctcaaggtccaacttatgttttcttaatttttaaaaaaatcttgaccattctccactctctaaaataatccacagtgagagaaacattcttttcccccatcccataaatacctctattaaatatggaaaatctgggcatggtgtctcacacctgtaatcccagcactttgggaggctgaggtgggtggactgcttggagctcaggagttcaagaccatcttggacaacatggtgataccctgcctctacaaaaagtacaaaaattagcctggcatggtggtgtgcacctgtaatcccagctattagggtggctgaggcaggagaattgcttgaacccgggaggcggaggttgcagtgagctgagatcgtgccactgcactccagcctgggggacagagcacattataattaactgttattttttacttggactcttgtggggaataagatacatgttttattcttatttatgattcaagcactgaaaatagtgtttagcatccagcaggtgcttcaaaaccatttgctgaatgattactatactttttacaagctcagctccctctatcccttccagcatcctcatctctgattaaataagcttcagtttttccttagttcctgttacatttctgtgtgtctccattagtgacctcccatagtccaagcatgagcagttctggccaggcccctgtcggggtcagtgccccacccccgccttctggttctgtgtaaccttctaagcaaaccttctggctcaagcacagcaatgctgagtcatgatgagtcatgctgaggcttagggtgtgtgcccagatgttctcagcctagagtgatgactcctatctgggtccccagcaggatgcttacagggcagatggcaaaaaaaaggagaagctgaccacctgactaaaactccacctcaaacggcatcataaagaaaatggatgcctgagacagaatgtgacatattctagaatatattatttcctgaatatatatatatatatatatacacatatacgtatatatatatatatatatatatttgttgttatcaattgccatagaatgattagttattgtgaatcaaatatttatcttgcaggtggcctctatacctagaagcggcagaatcaggctttattaatacatgtgtatagatttttaggatctatacacatgtattaatatgaaacaaggatatggaagaggaaggcatgaaaacaggaaaagaaaacaaaccttgtttgccattttaaggcacccctggacagctaggtggcaaaaggcctgtgctgttagaggacacatgctcacatacggggtcagatctgacttggggtgctactgggaagctctcatcttaaggatacatctcaggccagtcttggtgcattaggaagatgtaggcaactctgatcctgagaggaaagaaacattcctccaggagagctaaaagggttcacctgtgtgggtaactgtgaaggactacaagaggatgaaaaacaatgacagacagacataatgcttgtgggagaaaaaacaggaggtcaaggggatagagaaggcttccagaagaatggctttgaagctggcttctgtaggagttcacagtggcaaagatgtttcagaaatgtgacatgacttaaggaactatacaaaaaggaacaaatttaaggagaggcagataaattagttcaacagacatgcaaggaattttcagatgaatgttatgtctccactgagcttcttgaggttagcagctgtgagggttttgcaggcccaggacccattacaggacctcacgtatacttgacactgttttttgtattcatttgtgaatgaatgacctcttgtcagtctactcggtttcgctgtgaatgaatgatgtcttgtcagcctacttggtttcgctaagagcacagagagaagatttagtgatgctatgtaaaaacttcctttttggttcaagtgtatgtttgtgatagaaatgaagacaggctacatgatgcatatctaacataaacacaaacattaagaaaggaaatcaacctgaagagtatttatacagataacaaaatacagagagtgagttaaatgtgtaataactgtggcacaggctggaatatgagccatttaaatcacaaattaattagaaaaaaaacagtggggaaaaaattccatggatgggtctagaaagactagcattgttttaggttgagtggcagtgtttaaagggtgatatcagactaaacttgaaatatgtggctaaataactagaatactctttattttttcgtatcatgaatagcagatatagcttgatggccccatgcttggtttaacatccttgctgttcctgacatgaaatccttaatttttgacaaaggggctattcattttcattttatattgggcctagaaattatgtagatggtcctgaggaaaagtttatagcttgtctatttctctctctaacatagttgtcagcacaatgcctaggctataggaagtactcaaagcttgttaaattgaattctatccttcttattcaattctacacatggaggaaaaactcatcagggatggaggcacgcctctaaggaaggcaggtgtggctctgcagtgtgattgggtacttgcaggacgaagggtggggtgggagtggctaaccttccattcctagtgcagaggtcacagcctaaacatcaaattccttgaggtgcggtggctcactcctgtaatcacagcagtttgggacgccaaggtgggcagatcacttgaggtcaggagttggacaccagcccagccaacatagtgaaacctggtctctgcttaaaaatataaaaattagctggacgtggtgacgggagcctgtaatccaactacttgggaggctgaggcaggagaatcgcttgaaccggggaggtggagtttgcactgagcagagatcatgccattgcactccagcctccagagcgagactctgtctaaagaaaaacgaaaacaaacaaacaaacaaacaaacaaaacccatcaaattccctgaccgaacagaattctgtctgattgttctctgacttatctaccattttccctccttaaagaaactgtggaacttccttcagctagaggggcctggctcagaagcctctggtcagcatccaagaaatacttgatgtcactttggctaaaggtatgatgtgtagacaagctccagagatggtttctcatttccatatccacccacccagctttccaattttaaagccaattctgaggtagagactgtgatgaacaaacaccttgacaaaattcaacccaaagactcactttgcctagcttcaaaatccttactctgacatatactcacagccagaaattagcatgcactagagtgtgcatgagtgcaacacacacacacaccaattccatattctctgtcagaaaatcctgttggtttttcgtgaaaggatgttttcagaggctgaccccttgccttcacctccaatgctaccactctggtctaagtcactgtcaccaccacctaaattatagctgttgactcataacaatcttcctgcttctaccactgccccactacaatttcttcccaatatactatccaaattagtcttttcaaaatgtaagtcatatatggtcacctctttgttcaaagtcttctgatagtttcctatatcatttataataaaaccaaatccttacaattctctacaatagttgttcatgcatatattatgtttattacagatacgcatatatatagctctcatataaataaatatatatatttatgtgtatgtgtgtagagtgttttttcttacaactctatgatgtaggtattattagtgtcccaaattttataatttaggacttctatgatctcatcttttattctccccttcaccgaatctcatcctacattggccttattgatattccttgaaaattctaagcatcttacatctttagggtatttacatttgccattccctatgccctaaatatttaatcatagtttcatataaatgggttcctcatcatctatgggtactctctcaggtgttaactttatagtgaggactttcctgccatactacttaaagtagcgataccctttcaccctgtcctaatcacactctggccttcatttcagttttttttttttctccatagcacctaatctcattggtatataacatgtttcatttgcttatttaatgtcaagctctttccactatcaagtccatgaaaacaggaactttattcctctattctgtttttgtgctgtattcttagcaattttacaattttgaatgaaatgaatgagcagtcaaacacatatacaactataattaaaaggatgtatgctgacacatccactgctatgcacacacaaagaaatcagtggagtagagctggaagcgctaagcctgcatagagctagttagccctccgcaggcagagccttgatgggattactgagttctagaattggactcatttgttttgtaggctgagatttgctcttgaaaacttgttctgaccaaaataaaaggctcaaaagatgaatatcgaaaccagggtgttttttacactggaatttataactagagcactcatgtttatgtaagcaattaattgtttcatcagtcaggtaaaagtaaagaaaaactgtgccaaggcaggtagcctaatgcaatatgccactaaagtaaacattattccataggtgtcagatatggcttattcatccatcttcatgggaaggatggccttggcctggacatcagtgttatgtgaggttcaaaacacctctaggctataaggcaacagagctccttttttttttttctgtgctttcctggctgtccaaatctctaatgataagcatacttctattcaatgagaatattctgtaagattatagttaagaattgtgggagccattccgtctcttatagttaaatttgagcttcttttatgatcactgtttttttaatatgctttaagttctggggtacatgtgccatggtggtttgctgcacccatcaacccgtcatctacattaggtatttctcctaatgctatccttcccctagccccccacccccaacaggccccagtgtgtgatgttcccctccctgtgtccatggatcactggttttttttttttttttttttttttttttaaagtctcagttaaatttttggaatgtaatttattttcctggtatcctaggacctgcaagttatctggtcactttagccctcacgttttgatgataatcacatatttgtaaacacaacacacacacacacacacacacacatatatatatataaaacatatatatacataaacacacataacatatttatcgggcatttctgagcaactaactcatgcaggactctcaaacactaacctatagccttttctatgtatctacttgtgtagaaaccaagcgtggggactgagaaggcaatagcaggagcattctgactctcactgcctttggctaggtccctccctcatcacagctcagcatagtccgagctcttatctatatccacacacagtttctgacgctgcccagctatcaccatcccaagtctaaagaaaaaaataatgggtttgcccatctctgttgattagaaaacaaaacaaaataaaataagcccctaagctcccagaaaacatgactaaaccagcaagaagaagaaaatacaataggtatatgaggagactggtgacactagtgtctgaatgaggcttgagtacagaaaagaggctctagcagcatagtggtttagaggagatgtttctttccttcacagatgccttagcctcaataagcttgcggttgtggaagtttactttcagaacaaactcctgtggggctagaattattgatggctaaaagaagcccgggggagggaaaaatcattcagcatcctcacccttagtgacacaaaacagagggggcctggttttccatatttcctcatgatggatgatctcgttaatgaaggtggtctgacgagatcattgcttcttccatttaagccttgctcacttgccaatcctcagttttaaccttctccagagaaatacacattttttattcaggaaacatactatgttatagtttcaatactaaataatcaaagtactgaagatagcatgcataggcaagaaaaagtccttagctttatgttgctgttgtttcagaatttaaaaaagatcaccaagtcaaggacttctcagttctagcactagaggtggaatcttagcatataatcagaggtttttcaaaatttctagacatgagattcaaagccctgcacttaaaatagtctcatttgaattaactctttatataaattgaaagcacattctgaactacttcagagtattgttttatttctatgttcttagttcataaatacattaggcaatgcaatttaattaaaaaaacccaagaatttcttagaattttaatcatgaaaataaatgaaggcatctttacttactcaaggtcccaaaaggtcaaagaaaccaggaaagtaaagctatatttcagcggaaaatgggatatttatgagttttctaagttgacagactcaagttttaaccttcagtgcccatgatgtaggaaagtgtggcataactggctgattctggctttctactcctttttcccattaaagatccctcctgcttaattaacattcacaagtaactctggttgtactttaggcacagtggctcccgaggtcagtcacacaataggatgtctgtgctccaagttgccagagagagagattactcttgagaatgagcctcagccctggctcaaactcacctgcaaacttcgtgagagatgaggcagaggtacactacgaaagcaacagttagaagctaaatgatgagaacacatggactcatagagggaaacaacgcatactggggcctatcagagggtggagggtgagagaaggagaggatcaggaaaaatcactaatggatgctaagcgtaatacctgagtgatgagatcatctatacaacaaacccccttgacattcatttatctatgtaacaaacctgcacatcctgtacacgtacccctgaacttaaaataaaagttgaaaacaagaaagcaacagtttgaacacttgttatggtctattctctcattctttacaattacactagaaaatagccacaggctcctgcaaggcagccacagaatttatgacttgtgatatccaagtcattcctggataatgcaaaatctaacacaaaatctagtagaatcatttgcttacatctatttttgttctgagaatatagatttagatacataatggaagcagaataatttaaaatctggctaatttagaatcctaagcagctcttttcctatcagtggtttacaagccttgtttatatttttcctattttaaaaataaaaataaagtaagttatttgtggtaaagaatattcattaaagtatttatttcttagataataccatgaaaaacattcagtgaagtgaagggcctactttacccaacaagaatctaatttatataatttttcatactaatagcatctaagaacagtacaatatttgactcttcaggttaaacatatgtcataaattagccagaaagatttaagaaaatattggatgtttccttgtttaaattaggcatcttacagtttttagaatcctgcatagaacttaagaaattacaaatgctaaagcaaacccaaacaggcaggaattaatcttcatcgaatttgggtgtttctttctaaaagtcctttatacttaaatgtcttaagacatacatagattttattttactaattttaattatacagacaataaatgaatattcttactgattactttttctgactgtctaatctttctgatctatcctggatggccataacacttatctctctgaactttgggcttttaatataggaaagaaaagcaataatccatttttcatggtatctcatatgataaacaaataaaatgcttaaaaatgagcaggtgaagcaatttatcttgaaccaacaagcatcgaagcaataatgagactgcccgcagcctacctgacttctgagtcaggatttataagccttgttactgagacacaaacctgggcctttcaatgctataacctttcttgaagctcctccctaccacctttagccataaggaaacatggaatgggtcagatccctggatgcaagccaggtctggaaccataggcagtaaggagagaagaaaatgtgggctctgcaactggctccgagggagcaggagagaatcaaccccatactctgaatctaagagaagactggtgtccatactctgaatgggaagaatgatgggattacccatagggcttgttttagggagaaacctgttctccaaactcttggccttgagatacctggtccttattccttggactttggcaatgtctgaccctcacattcaagttctgaggaagggccactgccttcatactgtggatctgtagcaaattccccctgaaaacccagagctgtatcttaattgtttaaaaaaattatattatctcaaggactgttcttctctgagtagccaagctcagcttggttcaagctacaagcagctgagctgctttttgtctagtcattgttcttttatttcagtggatcaaatacgttctttccaaacctaggatcttgtcttcctaggctatatattttgtcccaggaagtcttaatctggggtccacagaacactagggggctggtgaagtttatagaaaaaaaatctgtatttttacttacatgtaactgaaatttagcattttcttctactttgaatgcaaaggacaaactagaatgacatcatcagtacctattgcatagttataaagagaaaccacagatattttcatactacaccataggtattgcagatctttttgtttttgtttttgtttgagatggagtttcgctcttattgcccaggctggagtgcagtggcatgatttcggctcactgcaacctccccttcctgcattcaagcaattctcctgccttggcctccagagtagctggggattacaggcacctgccaccatgccagtctaatttttgtatttttagtagagatggggtttcgccatgttggccaggctggtcttgaactcctgacctcagatgatctgcccgccttggcctcctgaagtgctgggattataggtgtgagccaccacgcctggcccattgcagatatttttaattcacatttatctgcatcactacttggatcttaaggtagctgtagacccaatcctagatctaatgctttcataaagaagcaaatataataaatactataccacaaatgtaatgtttgatgtctgataatgatatttcagtgtaattaaacttagcactcctatgtatattatttgatgcaataaaaacatattttttttagcacttacagtctgccaaactggcctgtgacacaaaaaaagtttaggaattcctggttttgtctgtgttagccaatggttagaatatatgctcagaaagataccattggttaatagctgaaagaaaatggagtagaaattcagtggcctggaataataacaatttgggcagtcattaagtcaggtgaagacttctggaatcatgggagaaaagcaagggagacattcttacttgccacaagtgtttttttttttttttttttatcacaaacataagaaaatataataaataacaaagtcaggttatagaagagagaaacgctcttagtaaacttggaatatggaatccccaaaggcacttgacttgggagacaggagccatactgctaagtgaaaaagacgaagaacctctagggcctgaacataggaaattgtaggaacagaaattcctagatctggtggggcaaggggagccataggagaaagaaatggtagaaatggatggagacggaggcagaggtgggcagatcatgaggtcaagagatcgagaccatcctggcaaacatggtgaaatcccgtctctactaaaaataaaaaaattagctgggcatggtggcatgcgcctgtagtcccagctgctcgggaggctgaggcaggagaatcgtttgaacccaggaggcgaaggttgcagtgagctgagatagtgccattgcactccagtctggcaacagagtgagactccgtctcaaaaaaaaaaaaaagaaagaaagaaaagaaaaagaaaaaagaaaaaataaatggatgtagaacaagccagaaggaggaactgggctggggcaatgagattatggtgatgtaagggacttttatagaattaacaatgctggaatttgtggaactctgcttctattattcccccaatcattacttctgtcacattgatagttaaataatttctgtgaatttattccttgattctaaaatatgaggataatgacaatggtattataagggcagattaagtgatatagcataagcaatattcttcaggcacatggatcgaattgaatacactgtaaatcccaacttccagtttcagctctaccaagtaaagagctagcaagtcatcaaaatggggacatacagaaaaaaaaaaggacactagaggaataatataccctgactcctagcctgattaatatatcgattcacttttttctctgtttgatgacaaattctggctttaaataattttaggattttaggcttctcagctcccttcccagtgagaagtataagcaggacagacaggcaagcaagaagagagccccaggcaatactcacaaagtagccagtgtcccctgtggtcatagagaaatgaaaagagagaggattccctggaagcactggatgtaatcttttctgtctgtcctctctagggaatcaccccaaggtactgtactttgggattaaggctttagtcccactgtggactacttgctattctgttcagtttctagaaggaactatgtacggtttttgtctccctagagaaactaaggtacagaagttttgtttacaatgcactccttaagagagctagaactgggtgagattctgttttaacagctttattttcttttccttggccctgtttttgtcaactgtcaccacctttaaggcaaatgttaaatgtgctttggctgaaactttttttcctattttgagatttgctcctttatatgaggctttcttggaaaaggagaatgggagagatggatatcattttggaagatgatgaagagggtaaaaaaggggacaaatggaaatttgtgttgcagatagatgaggagccaacaaaaaagagcctcaggatccagcacacattatcacaaacttagtgtccatccatcactgctgaccctctccggacctgactccacccctgaggacacaggtcagccttgaccaatgacttttaagtaccatggagaacagggggccagaacttcggcagtaaagaataaaaggccagacagagaggcagcagcacatatctgcttccgacacagctgcaatcactagcaagctctcaggcctggcatcatggtgcattttactgctgaggagaaggctgccgtcactagcctgtggagcaagatgaatgtggaagaggctggaggtgaagccttgggcaggtaagcattggttctcaatgcatgggaatgaagggtgaatattaccctagcaagttgattgggaaagtcctcaagattttttgcatctctaattttgtatctgatatggtgtcatttcatagactcctcgttgtttacccctggacccagagattttttgacagctttggaaacctgtcgtctccctctgccatcctgggcaaccccaaggtcaaggcccatggcaagaaggtgctgacttcctttggagatgctattaaaaacatggacaacctcaagcccgcctttgctaagctgagtgagctgcactgtgacaagctgcatgtggatcctgagaacttcaaggtgagttcaggtgctggtgatgtgattttttggctttatattttgacattaattgaagctcataatcttattggaaagaccaacaaagatctcagaaatcatgggtcgagcttgatgttagaacagcagacttctagtgagcataaccaaaacttacatgattcagaactagtgacagtaaaggactactaacagcctgaattggcttaacttttcaggaaatcttgccagaacttgatgtgtttatcccagagaattgtattatagaattgtagacttgtgaaagaagaatgaaatttggcttttggtagatgaaagtccatttcaaggaaatagaaatgccttattttatgtgggtcatgataattgaggtttagaagagatttttgcaaaaaaaataaaagatttgctcaaagaaaaataagacacattttctaaaatatgttaaatttcccatcagtattgtgaccaagtgaaggcttgtttccgaatttgttggggattttaaactcccgctgagaactcttgcagcactcacattctacatttacaaaaattagacaattgcttaaagaaaaacagggagagagggaacccaataatactggtaaaatggggaagggggtgagggtgtaggtaggtagaatgttgaatgtagggctcatagaataaaattgaacctaagctcatctgaattttttgggtgggcacaaaccttggaacagtttgaggtcagggttgtctaggaatgtaggtataaagccgtttttgtttgtttgtttgttttttcatcaagttgttttcggaaacttctactcaacatgcctgtgtgttattttgtcttttgcctaacagctcctgggtaacgtgatggtgattattctggctactcactttggcaaggagttcacccctgaagtgcaggctgcctggcagaagctggtgtctgctgtcgccattgccctggcccataagtaccactgagttctcttccagtttgcaggtcttcctgtgaccctgacaccctccttctgcacatggggactgggcttggccttgagagaaagccttctgtttaataaagtacattttcttcagtaatcaaaaattgcaattttatcttctccatcttttactcttgtgttaaaaggaaaaagtgttcatgggctgagggatggagagaaacataggaagaaccaagagcttccttaagaaatgtatgggggcttgtaaaattaatgtggatgttatgggagaattcccaagattcccaaggaggatgatatgatggagaaaaatctttatcggggtgggaaaatggttaattaagtggcagagactcctaggcagtttttactgcaccggggaaagaaggagctgttgtggtacctgagaaagcagatttgtggtacatgtcacttttcattaaaaacaaaaacaaaacaaaacaaaacttcatagatatccaagatataggctgagaattactattttaatttactcttatttacattttgaagtagctagcttgtcacatgttttatgaaattgatttggagataagatgagtgtgtatcaacaatagcctgctctttccatgaaggattccattatttcatgggttagctgaagctaagacacatgatatcattgtgcattatcttctgatacaatgtaacatgcactaaaataaagttagagttaggacctgagtgggaaagtttttggagagtgtgatgaagactttccgtgggagatagaatactaataaaggcttaaattctaaaaccagcaagctagggcttcgtgacttgcatgaaactggctctctggaagtagaagggagagtaagacatacgtagaggactaggaaagaccagatagtacagggcctggctacaaaaatacaagcttttactatgctattgcaatactaaacgataagcattaggatgttaagtgactcaggaaataagattttgggaaaaagtaatctgcttatgtgcacaaaatggattcaagtttgcagataaaataaaatatggatgatgattcaaggggacagatacaatggttcaaacccaagaggagcagtgagtctgtggaattttgaaggatggacaaaggtggggtgagaaagacatagtattcgacctgactgtgggagatgagaaggaagaaggaggtgataaatgactgaaagctcccagactggtgaagataacaggaggaaaccatgcacttgaccctggtgactctcatgtgtgaagggtagagggatattaacagatttactttttaggaagtgctagattggtcagggagttttgaccttcaggtcttgtgtctttcatatcaaggaacctttgcattttccaagttagagtgccatattttggcaaatataactttattagtaattttatagtgctctcacattgatcagactttttcctgtgaattacttttgaatttggctgtatatatccagaatatgggagagagacaaataattattgtagttgcaggctatcaacaatactggtctctctgagccttataacctttcaatatgccccataaacagagtaaacagggattattcatggcactaaatattttcacctaggtcagtcaacaaatggaggcaatgtgcattttttgatacatatttttatatatttatggggcatgtgatacttacatgcctagaacatgtgactgattaagtctagatatttaggatatccattactttgagcatttatcatttctatgtattgagaaaatttcaaatcctcatttctgaccattttgaaatatataataaatagtaattaactatagtcaccctactcaaatatcaacattataaactaactaatccttctttccacttttttaccaaccaacatctcttaaatcccctgccatacacatcacacatttttcagctctgataactatcattctactctcataccaccatgagaccacttttttagctccacagatgaataaaaacatgtgatatttgactttctgtatctggcttattttattatctatctctttggcataccaagagtttgtttttgttctgcttcagggctttcaattaacataatgacctctggttccatccatgttgctacaaatgacaagatttcattctttttcatggcaaaatagtactgtgcaaaaaatacaattttttaatccgttcatctgttgatagacacttaggttgatcccaaaccttaactattgtgaataggtgcttcaataaacatgagtgtaatgtgtccattggatatactgatttcctttcttttggataaataaccactagtgagattgctggattgtatgatagttctgtttttagtttattgagaaatcttcatactgttttccataatggttgtactattttacattcccaccaacagtgtgtaagaaagagttcccttttctccatatcctcacaaggatctgttattttttgtcttttttgttaatagcattttaactagagtaagtagatatctcattgtagttttgatttgcatttccctgatcattagtgatgttgagattttttcatatgtttgttggtcatttgtatatctttttctgagattgtctgttcatgtccttatcctacttttattgggattgttgttattttcttgataatcattgtgtcattttagagcctggatattattcttttgtcagatgtatagattgtgaagattttctcctctgtgggttgtctgtttattctgcagactcttccttttgccatgcaaaagctctttagtttaatttagtcccagatattttctttgtttttatgtgtttgcatttgtgttcttgtcatgaaatcctttcctaagccaatgtgtagaagggtttttccgatgttattttctagaattgttacagtttcaggcttagatttaagtccttgatccatcttaagttgatttttgtataaggtgagagatgaagatccagtttcattctcctacatgtagcttgccagctatcccgactcatttgttgaatagggtgccctttcccatttatgtttttgtttgctttgtcaaagatcagttcggatgtaagtatttgagtttatttctgggttctctattctgttccattggtccgatgtgcctatttgtacaccagcatcatgctgtgtttttggtgactatggccttattgtatagtttgaaatgaggtaatgtaatgccattcagatttgttcttttttttagacttgcttgtttattgggctcttttttggttccataagaattttaggattgttttttctagttctgtgaaggctaatggtggtatttatgggaattgcaatgcaatttgtaggttgcttctggcattatggccattttcacaatattgattctacccatctatgagaatggcatgtgtttccatttgtttgtgtcttatatgattactatcagccgtgttttgtagttttccttgtagatgtctttcacctccttggttaggtatatattcctaagtttttgttttgttttgttttgttttttgcagctattgtaaaaggggttgagttattgattttattctcatcttggtcattgctggtatgtaagaaagcaactcattggtgtacgttaattttgtatccagaaactttgctgaattattttatcagttctagggggttttggaggagtctttagagttttctacatacacaatcatatcatcagcaaacagtgacagtttgactttctctttaacaatttggatgtgctttacttgtttctcttgtctgattgctcttgctaggacttccagtaatatgttaaagagaagtggtgagagtgggtatccttgtctcattccagttttcagacagaatgcttttaactttttcccattcaatataatgttggctgtgtgtttaccatagctggcttttattacattgaggtatgtcctttgtaaaccgattttgctgagttttagtcataaagtgatgttgaattttgttgaatgcagtttctgtggctattgagataatcacatgatttttgtttccaattctctttatgttgtgtatcacacttattgacttgcgtatgttaaaccatccgtgcatccctcgcatgaaaccacttgatcatgggttttgatatgccgtgtgggatgctattagctatattttgtcaaggatgttggcatctatgttcatcagggatattgatctgtagtgttttttttttttggttatgttctttcccagttttggtattaaggtgatactggcttcatagaatgatttagggaggattctctctttctctatcttgtagaatactgtcaataggattggtatcaattcttctttgaatgtctggtagaattcgaacgtctcctttaggttttctagtttattcatgtaaaggtgttcatagtaaccttgaataatcttttgtatttctgtggtatcagtaatagtatctcctgttttgtttctaactgagtttatttgcacttctctcctcttttcttggttaatcttgctaatggtctatcagttttatttatcttttcaaagaaccagctttttatttcatttagcttttgtatttttttgcagttgttttaatttcatttagttctcctcttatcttagttattccctttcttttgctgggttttggttctgtttgtttttgtttctctagtttcttgtggtgtgaccttatattgtctgtcctctttcagactctttgacatcgacatttagggctgtgaactttccttttagcaccatctttgctgtatcctagaggttttgataggtgtgtcactattgtcggtcagttcaagtaattttgttgttcttattatactttaagttctgggatacatgtgcagaatgtgcaggtttgttacataggtatagatgtgccatggtggtttgctgctcccatcaacctgtcatctacattaggtatttcttttaatgttatccctctcctaaccccctcaccccccgacaggccctggtgtgtgatgttcccctccctgtgtccatgtgttctcattgttcaactcccacttatgagtgagaacgtgtggtgtttggtttctctgttcctgtgttagtttgctcagaatgatgtttccaccttcaccatgtccctgcaaagacatgaactcatcattttatggctgcatatattccatggtgtatatgtgccacattttctttatccattatatcgctgatggccatttgggttggttccaagtctttggtattgtgaatagtgccgcaataaacatacgtgtgcacatgtctttatagtagaatgatttctaattctttgggtatatacccagtaatgggattgctgggtcaaacagtatttctggttctagatccttgaggaattgccacactgtcttccacaatggttgaactaatttacacacccatcaacagtgtaaaatttttcctattcttccacatcctctccagcaccttttgtttcctgactttttaataattgccattctaactggcatgagatggtatctcattgtggttttgatttgcatttctctaatgaccagtgatgatgagcttcttttcatgtgtttcttggccacataaatgacttctttagagaagcatctgttcatatcctttgtccactttttgatggggtcgttaggttttttcttgtaaatttgttgaagttctttgtagattttggatgttagccctttgtcagatggatagattggcaaaaattttctcccattctgtaggttgcctgttcactctgatgatagtcttttgctgtgcagaagctctttagtttaattagatcccatatgtcaattttggcctttgttgtcattgcttttgatgtttagtcgtggaattttgcccatgcctatgtcctgaatggtattgcctaggttatcttctaggatttttatggttttaggttgcacatttaagtctttaatccaccttgagttaatttttgtataaggtgtaaggaaggggtacagtttcagttttatgcatattgctagccagtttttccagcaccatttattaaatagggaattctttctccattgcttttgtgatgtttgtcaaagatcagatggtcgtagatgtgtggcattatttctgaggcttctgttctgttccactggtctatatatctgttttggtaccagtaccatgctgtttttgttactgtagccttgtagtatagcttgaagtcaggtagcatcatgcctccagctttgttctttttgtttaggattgtcttggctatatgggctcttttttgattccatatgacatttaaagtagttttttctaattctttgaaaaaagtcagtggtagcttgatggggatagcattgaatctataaattactttgggcagtatggccattttaaagatattgattctttctatctatgagcatggaatgtttttccatttgtttgtgtcctctcttatttccttgagcagtgagtggtttgtagctctccttgaagaggttcttcacatcccttataagttgtatttctaggtattttattttattctctttgcagcaattgtgaatgggagttcacccatgatttggctctctgcttgtctattattggtgtataggaatgcttgtgatttttgcacactgattttgtatcttgagactttgctgaagctgtttatcagcttaagattttgggctgagatgacagggtcttctaaatatacaatcatgtcatctgcaaacagagacaatttgacttcctctcttcctatttgaatatgctttatttctttctcttgcctgattgtcctggcgagaacttccaatactatgttgagtaagagtggcgagagggcatccttgtcttgtgccggttttcaaagcaaatgatttttaaatttccgtcttgatttcattgttgacccaatgatcattcaggagcaggttatttaatttccctgtatttgcatggttttgaaggttccttttgtagttgatttccaattttattctactgtggtctgagagagtgcttgatataatttcaatttttaaaaatttattgaggcttgttttgtggcatatcatatggcctatcttggagaaagttccatgtgctgatgaatagaatgtgtattctgcagttgttgggtagaatgtcctgtaaatatctgttaagtccatttgttctttaaatccattgtttctttgtagactgtcttgatgacctgcctagtgcagtcagtggagtattgaagtcccccactattattatgttgctgtctagtagtaattgttttataaatttgggatctccagtattagatgcatatatattaagaattgtaatattctcccattggacaagggcttttatcattatatgatgtccctctttgtcttttttaactgctgtttctttaaagtttgttttgtctgacataagaatagctgctttggctcgcttttggtgtccatttgtgtggaatgtcattttccacccctttaccttaagtttatgtgagtccttatgtgttaggtgagtctcctgaaggcggcagataactggttggtgaattctattcattctgcaattctgtatcttttaagtggagcatttagtccatttacattcaacatcagtattgaggtgtgaggtgactattccattcttcgtggtatttgttgcctgtgtatctttttatctgtatttttgttgtatatgtcctatgggatttatgctttaaagaggttctgttttgatgtgcttccagggtttatttcaagatttagagctccttttatcattcttgtagtgttggcttggtagtgccgaattctctcagcatttgtttttctgaaaaacactgtgtattttcttcatttgtgaagcttagtttcactggatataaaattcttggctgataattgttttgtttaagaaggctgaagatagggccatattcacttctagcttttacggtttctgctgagaaatctgctgttaatctgataggttttctttcataggttacctggtagtttcacctcacagctcttaagattctctttgtctttagataactttggatactctgatgacaatgtacctaggcaatgatatttttgcaatgaatttcccaggtgtttattgagcttctttgtatttggatatctaggtctctagcaaggagggggaagttttccttgattatttccatggacaagttttccaaacttttagatttctcttctttctcaggaatgctgattattcttaggtttgattgtttaacataatcccagatttcttggaggctttgttcatattttcttattcttttttctttgtctttgttggattgggtaattcaaaaactttgtcttcaagctctgaatttcttctgcttggattctattgctgagactttctagagcattttgcatttctataagtgcatccattcatccattgtttcctgaagttttgaatgttttttatttatgctatctctttaactgaagatttctcccctcatttcttgtatcatatttttggtttttttaaaattggacttcaccttcctcggatgcctccttgattagcttaataactgaccttctgaattatttttcaggtaaatcagggatttcttcttggtttggatgcattgctggtgagctagtatgattttttggggggtgttaaagaaccttgtttttcatattaccagagttagttttctggttccttctcacttgggtaggctctgtcagagggaaagtctaggcctcaaggctgagacttttgtcccagcaggtgttcccttgatgtagcacagtcccccttttcctaggacgtggggcttcctgagagccgaactgtagtgattgttatctctcttctggatctagccacccatcaggtctaccagactccaggctggtactggggtttgtctgcacagagtcttgtgacgtgaaccatctgtgggtctctcagccatagatacaaccacctgctccaatggaggtggtagaggatgaaatgaactctgtgagggtccttacttttggttgttcaatgcactatctttttgtgctggttggcctcctgccaggaggtggcactttctagaaagcatcagcagaggcagtcaggtggtggtggctgggggggctggggcactagaactcccaagaatatatgccctttgtcttcagctactagggtgagtaaggaaggaccatcaggtgggggcaggactagtcgtgtctgagctcagagtctccttgggcaggtctttctgtggctactgtgggaggatgggggtgtagtttccaggtcaatggatttatgttcctaggacaattatggctgcctctgctgtgtcatgcaggtcatcaggaaagtgggggaaagcaagcagtcacgtgacttgcccagctcccatgcaactcaaaaggttggtctcacttccagcgtgcaccctcccccgcaacagctccgaatctgtttccatgcagtcagtgagcaaggctgagaacttgcccaggctaccagctgcgaaaccaagtagggctgtcctacttccctgccagtggagtctgcacaccaaattcatgtccccccaccaacccccccactgcccagcccctagatctggccaggtggagattttctttttcctgtctcttttcccagttcctctggcagccctcccaaatgacccctgtgaggcaaggcagaaatggcttcctaggggacccagagagcccacagggcttttcccgctgcttcctctacccctgtattttgcttggccctctaaattgactcagctccaggtaaggtcagaatcttctcctgtggtctagatcttcaggttcccagtgaggatgtgtgtttgggggtagacggtcccccttttccacttccacagtttgggcactcacaatatttggggtgtttcccgggtcctacatgagcaatctgcttctttcagagggtgtgtgcgttctctcagctttcttgaatttatttctgcaggtggttctgcaaaaaaaattcctgatgggagacttcacatgctgctctgtgcatccgagtgggagctgcaatgtacttctgctgccacccatctgccatcaccctctaatttgtcggtaatatgcatttttaatcaatctttttttctctctctctcttttcttctcccccaaaactatactgccctttgatatcaaggaatcaaggccgtgatgttgaggggtgggcagtggatacactctttaccccttagggagcatatctagatttagatattgccaattcaagataacttaattgaaagcaaattcataatgaatacacacacacacacacacatctgcatgacaagatttttaatagttgaaagaataactaataattgtccacaggcaataagggctttttaagcaaaacagttgtgataaaacaggtcattcttagaatagtaatccagccaatagtacaggttgcttagagattatgacattaccagagttaaaattcaataatggcttctcactccctaccactgaggacaagtttatgtccttaggtttatgcttccctgaaacaataccacctgctattctccactttacatatcaacggcactggttctttatctaactctctggcacagcaggagtttgttttcttctgcttcagagctttgaatttactatttcagcttctaaactttatttgcaatgccttcccatggcagactccttctgtcattttgcctctgttcgaaaactttttccttaatttcattcttagttaataatatctgaaattattttgttgtttaacttaattattaattttatgtatgttctacctagatataatcttctagaggattgttttattctctgacttatttaacttaaatgcccactacctttaaaaattatgacatttatttaacagatatttgctgaacaaatgtttgaaaatacatgggaaagaatgcttgaaaacacttgaaattgcttgtgtaaagaaacagttttatcagttaggatttaatcaatgtcagaagcaatgatataggaaaaatcgaggaataagacagttatggataaggagaaatcaacaaactcttaaaagatattgcctcaaaagcataagaggaaataagggtttatacatgacttttagaacactgcctgggtttttggataaatggggaagttgttggaaaacaggagggatcctagatattccttagtctgaggaggagcaattaagattcacttgtttagaggctgggagtggtggctcacgcctgtaatcccagaattttgggaggccaaggcaggcagatcacctgaggtcaagagttcaagaccaacctggccaacatggtgaaatcccatctctacaaaaatacaaaaattagacaggcatgatggcaagtgcctgtaatcccagctacttgggaggctgaggaaggagaattgcttgaacctggaaggcaggagttgcagtgagccgagatcataccactgcactccagcctgggtgacagaacaagactctgtctcaaaaaaaaaaaagagagattcaaaagattcacttgtttaggccttagcgggcttagacaccagtctctgacacattcttaaaggtcaggctctacaaatggaacccaaccagactctcagatatggccaaagatctatacacacccatctcacagatcccctatcttaaagagaccctaatttgggttcacctcagtctctataatctgtaccagcataccaataaaaatctttctcacccatccttagattgagagaagtcacttattattatgtgagtaactggaagatactgataagttgacaaatctttttctttcctttcttattcaacttttattttaacttccaaagaacaagtgcaatatgtgcagctttgttgcgcaggtcaacatgtatctttctggtcttttagccgcctaacactttgagcagatataagccttacacaggattatgaagtctgaaaggattccaccaatattattataattcctatcaacctgataagttaggggaaggtagagctctcctccaataagccagatttccagagtttctgacgtcataatctaccaaggtcatggatcgagttcagagaaaaaacaaaagcaaaaccaaacctaccaaaaaataaaaatcccaaagaaaaaataaagaaaaaaacagcatgaatacttcctgccatgttaagtggccaatatgtcagaaacagcactgagttacagataaagatgtctaaactacagtgacatcccagctgtcacagtgtgtggactattagtcaataaaacagtccctgcctcttaagagttgttttccatgcaaatacatgtcttatgtcttagaataagattccctaagaagtgaacctagcatttatacaagataattaattctaatccatagtatctggtaaagagcattctaccatcatctttaccgagcatagaagagctacaccaaaaccctgggtcatcagccagcacatacacttatccagtgataaatacacatcatcgggtgcctacatacatacctgaatataaaaaaaatacttttgctgagatgaaacaggcgtgatttatttcaaataggtacggataagtagatattgaagtaaggattcagtcttatattatattacataacattaatctattcctgcactgaaactgttgctttataggatttttcactacactaatgagaacttaagagataatggcctaaaaccacagagagtatattcaagaataagtatagcacttcttatttggaaaccaatgcttactaaatgagactaagacgtgtcccatcaaaaatcctggacctatgcctaaaacacatttcacaatccctgaacttttcaaaaattggtacatgctttaactttaaactacaggcctcactggagctacagacaagaaggtgaaaaacggctgacaaaagaagtcctggtatcttctatggtgggagaagaaaactagctaaagggaagaataaattagagaaaaattggaatgactgaatcggaacaaggcaaaggctataaaaaaaattaagcagcagtatcctcttgggggccccttccccacactatctcaatgcaaatatctgtctgaaacggttcctggctaaactccacccatgggttggccagccttgccttgaccaatagccttgacaaggcaaacttgaccaatagtcttagagtatccagtgaggccaggggccggcggctggctagggatgaagaataaaaggaagcacccttcagcagttccacacactcgcttctggaacgtctgaggttatcaataagctcctagtccagacgccatgggtcatttcacagaggaggacaaggctactatcacaagcctgtggggcaaggtgaatgtggaagatgctggaggagaaaccctgggaaggtaggctctggtgaccaggacaagggagggaaggaaggaccctgtgcctggcaaaagtccaggtcgcttctcaggatttgtggcaccttctgactgtcaaactgttcttgtcaatctcacaggctcctggttgtctacccatggacccagaggttctttgacagctttggcaacctgtcctctgcctctgccatcatgggcaaccccaaagtcaaggcacatggcaagaaggtgctgacttccttgggagatgccataaagcacctggatgatctcaagggcacctttgcccagctgagtgaactgcactgtgacaagctgcatgtggatcctgagaacttcaaggtgagtccaggagatgtttcagcactgttgcctttagtctcgaggcaacttagacaactgagtattgatctgagcacagcagggtgtgagctgtttgaagatactggggttgggagtgaagaaactgcagaggactaactgggctgagacccagtggcaatgttttagggcctaaggagtgcctctgaaaatctagatggacaactttgactttgagaaaagagaggtggaaatgaggaaaatgacttttctttattagatttcggtagaaagaactttcacctttcccctatttttgttattcgttttaaaacatctatctggaggcaggacaagtatggtcgttaaaaagatgcaggcagaaggcatatattggctcagtcaaagtggggaactttggtggccaaacatacattgctaaggctattcctatatcagctggacacatataaaatgctgctaatgcttcattacaaacttatatcctttaattccagatgggggcaaagtatgtccaggggtgaggaacaattgaaacatttgggctggagtagattttgaaagtcagctctgtgtgtgtgtgtgtgtgtgtgcgcgcgtgtgtttgtgtgtgtgtgagagcgtgtgtttcttttaacgttttcagcctacagcatacagggttcatggtggcaagaagataacaagatttaaattatggccagtgactagtgctgcaagaagaacaactacctgcatttaatgggaaagcaaaatctcaggctttgagggaagttaacataggcttgattctgggtggaagcttggtgtgtagttatctggaggccaggctggagctctcagctcactatgggttcatctttattgtctcctttcatctcaacagctcctgggaaatgtgctggtgaccgttttggcaatccatttcggcaaagaattcacccctgaggtgcaggcttcctggcagaagatggtgactggagtggccagtgccctgtcctccagataccactgagctcactgcccatgatgcagagctttcaaggataggctttattctgcaagcaatacaaataataaatctattctgctaagagatcacacatggttgtcttcagttcttttttttatgtctttttaaatatatgagccacaaagggttttatgttgagggatgtgtttatgtgtatttatacatggctatgtgtgtttgtgtcatgtgcacactccacacttttttgtttacgttagatgtgggttttgatgagcaaataaaagaactaggcaataaagaaacttatacatgggagcgtctgcaagtgggagtaaaaggtgcaggagaaatctggttggaagaaagacctctataggacaggactcctcagaaacagatgttttggaagagatggggaaaggttcagtgaagggggctgaacccccttccctggattgcagcacagcagcgaggaaggggctcaacgaagaaaaagtgttccaagctttaggaagtcaaggtttaggcagggatagccattctattttattaggggcaatactatttccaacggcatctggcttttctcagcccttgtgaggctctacggggaggttgaggtgttagagatcagagcaggaaacaggtttttctttccacggtaactacaatgaagtgatccttactttactaaggaactttttcattttaagtgttgacgcatgcctaaagaggtgaaattaatcccatacccttaagtctacagactggtcacagcatttcaaggaggagacctcattgtaagcttctagggaggtggggacctaggtgaaggaaatgagccagcagaagctcacaagtcagcatcagcgtgtcatgtctcagcagcagaacagcacggtcagatgaaaatatagtgtgaagaatttgtataacattaattgagaaggcagattcactggagttcttatataattgaaagttaatgcacgttaataagcaagagtttagtttaatgtgatggtgttatgaacttaacgcttgtgtctccagaaaattcacatgctgaatccccaactcccaattggctccatttgtgggggaggctttggaaaagtaatcaggtttagaggagctcatgagagcagatccccatcatagaattattttcctcatcagaagcagagagattagccatttctcttccttctggtgaggacacagtgggaagtcagccacctgcaacccaggaagagagccctgaccaggaaccagcagaaaagtgagaaaaaatcctgttgttgaagtcacccagtctatgctattttgttatagcaccttgcactaagtaaggcagatgaagaaagagaaaaaaataagcttcggtgttcagtggattagaaaccatgtttatctcaggtttacaaatctccacttgtcctctgtgtttcagaataaaataccaactctactactctcatctgtaagatgcaaatagtaagcctgatcccttctgtctaacttcgaattctattttttcttcaacgtactttaggcttgtaatgtgtttatatacagtgaaatgtcaagttctttctttatatttctttctttcttttttttcctcagcctcagagttttccacatgcccttcctaccttcaggaacttctttctccaaacgtcttctgcctggcctccattcaaatcataaaggacccacttcaaatgccatcactcactaccatttcacaattcgcactttctttctttgtcctttttttttttagtaaaacaagtttataaaaaattgaaggaataaatgaatggctacttcataggcagagtagacacaagggctactggttgccgatttttattgttatttttcaatagtatgctaaacaaggggtagattatttatgctgcccatttttagaccataaaagataacttcctgatgttgccatggcattttttttccttttaattttatttcatttcattttaatttcgaaggtacatgtgcaggatgtgcaggcttgttacatgggtaaatgtgtgtctttctggccttttagccatctgtatcaatgagcagatataagctttacacaggatcatgaaggatgaaagaatttcaccaatattataataatttcaatcaacctgatagcttaggggataaactaatttgaagatacagcttgcctccgataagccagaattccagagcttctggcattataatctagcaaggttagagatcatggatcactttcagagaaaaacaaaaacaaactaaccaaaagcaaaacagaaccaaaaaacctccataaatacttcctacccagttaatggtccaatatgtcagaaacagcactgtgttagaaataaagctgtctaaagtacactaatattcgagttataatagtgtgtggactattagtcaataaaaacaacccttgcctctttagagttgttttccatgtacacgcacatcttatgtcttagagtaagattccctgagaagtgaacctagcatttatacaagataattaattctaatccacagtacctgccaaagaacattctaccatcatctttactgagcatagaagagctacgccaaaaccctgggtcatcagccagcacacacacttatccagtggtaaatacacatcatctggtgtatacatacatacctgaatatggaatcaaatatttttctaagatgaaacagtcatgatttatttcaaataggtacggataagtagatattgaggtaagcattaggtcttatattatgtaacactaatctattactgcgctgaaactgtggtctttatgaaaattgttttcactacactattgagaaattaagagataatggcaaaagtcacaaagagtatattcaaaaagaagtatagcactttttccttagaaaccactgctaactgaaagagactaagatttgtcccgtcaaaaatcctggacctatgcctaaaacacatttcacaatccctgaacttttcaaaaattggtacatgctttagctttaaactacaggcctcactggagctacagacaagaaggtaaaaaacggctgacaaaagaagtcctggtatcctctatgatgggagaaggaaactagctaaagggaagaataaattagagaaaaactggaatgactgaatcggaacaaggcaaaggctataaaaaaaattaagcagcagtatcctcttgggggccccttccccacactatctcaatgcaaatatctgtctgaaacggtccctggctaaactccacccatgggttggccagccttgccttgaccaatagccttgacaaggcaaacttgaccaatagtcttagagtatccagtgaggccaggggccggcggctggctagggatgaagaataaaaggaagcacccttcagcagttccacacactcgcttctggaacgtctgagattatcaataagctcctagtccagacgccatgggtcatttcacagaggaggacaaggctactatcacaagcctgtggggcaaggtgaatgtggaagatgctggaggagaaaccctgggaaggtaggctctggtgaccaggacaagggagggaaggaaggaccctgtgcctggcaaaagtccaggtcgcttctcaggatttgtggcaccttctgactgtcaaactgttcttgtcaatctcacaggctcctggttgtctacccatggacccagaggttctttgacagctttggcaacctgtcctctgcctctgccatcatgggcaaccccaaagtcaaggcacatggcaagaaggtgctgacttccttgggagatgccataaagcacctggatgatctcaagggcacctttgcccagctgagtgaactgcactgtgacaagctgcatgtggatcctgagaacttcaaggtgagtccaggagatgtttcagcactgttgcctttagtctcgaggcaacttagacaactgagtattgatctgagcacagcagggtgtgagctgtttgaagatactggggttgggagtgaagaaactgcagaggactaactgggctgagacccagtggcaatgttttagggcctaaggagtgcctctgaaaatctagatggacaactttgactttgagaaaagagaggtggaaatgaggaaaatgacttttctttattagatttcggtagaaagaactttcacctttcccctatttttgttattcgttttaaaacatctatctggaggcaggacaagtatggtcgttaaaaagatgcaggcagaaggcatatattggctcagtcaaagtggggaactttggtggccaaacatacattgctaaggctattcctatatcagctggacacatataaaatgctgctaatgcttcattacaaacttatatcctttaattccagatgggggcaaagtatgtccaggggtgaggaacaattgaaacatttgggctggagtagattttgaaagtcagctctgtgtgtgtgtgtgtgtgtgtgtgtgtcagcgtgtgtttcttttaacgtcttcagcctacaacatacagggttcatggtgggaagaagatagcaagatttaaattatggccagtgactagtgcttgaaggggaacaactacctgcatttaatgggaaggcaaaatctcaggctttgagggaagttaacataggcttgattctgggtggaagctgggtgtgtagttatctggaggccaggctggagctctcagctcactatgggttcatctttattgtctcctttcatctcaacagctcctgggaaatgtgctggtgaccgttttggcaatccatttcggcaaagaattcacccctgaggtgcaggcttcctggcagaagatggtgactgcagtggccagtgccctgtcctccagataccactgagcctcttgcccatgattcagagctttcaaggataggctttattctgcaagcaatacaaataataaatctattctgctgagagatcacacatgattttcttcagctcttttttttacatctttttaaatatatgagccacaaagggtttatattgagggaagtgtgtatgtgtatttctgcatgcctgtttgtgtttgtggtgtgtgcatgctcctcatttatttttatatgagatgtgcattttgatgagcaaataaaagcagtaaagacacttgtacacgggagttctgcaagtgggagtaaatggtgttggagaaatccggtgggaagaaagacctctataggacaggacttctcagaaacagatgttttggaagagatgggaaaaggttcagtgaagacctgggggctggattgattgcagctgagtagcaaggatggttcttaatgaagggaaagtgttccaagctttaggaattcaaggtttagtcaggtgtagcaattctattttattaggaggaatactatttctaatggcacttagcttttcacagcccttgtggatgcctaagaaagtgaaattaatcccatgccctcaagtgtgcagattggtcacagcatttcaagggagagacctcattgtaagactctgggggaggtggggacttaggtgtaagaaatgaatcagcagaggctcacaagtcagcatgagcatgttatgtctgagaaacagaccagcactgtgagatcaaaatgtagtgggaagaatttgtacaacattaattggaaggtttacttaatggaatttttgtatagttggatgttagtgcatctctataagtaagagtttaatatgatggtgttacggacctggtgtttgtgtctcctcaaaattcacatgctgaatccccaactcccaactgaccttatctgtgggggaggcttttgaaaagtaattaggtttagctgagctcataagagcagatccccatcataaaattattttccttatcagaagcagagagacaagccatttctctttcctcccggtgaggacacagtgagaagtccgccatctgcaatccaggaagagaaccctgaccacgagtcagccttcagaaatgtgagaaaaaactctgttgttgaagccacccagtcttttgtattttgttatagcaccttacactgagtaaggcagatgaagaaggagaaaaaaataagcttgggttttgagtgaactacagaccatgttatctcaggtttgcaaagctcccctcgtcccctatgtttcagcataaaatacctactctactactctcatctataagacccaaataataagcctgcgcccttctctctaactttgatttctcctatttttacttcaacatgctttactctagccttgtaatgtctttacatacagtgaaatgtaaagttctttattctttttttctttctttcttttttctcctcagcctcagaatttggcacatgcccttccttctttcaggaacttctccaacatctctgcctggctccatcatatcataaaggtcccacttcaaatgcagtcactaccgtttcaggatatgcactttctttcttttttgttttttgttttttttaagtcaaagcaaatttcttgagagagtaaagaaataaacgaatgactactgcataggcagagcagccccgagggccgctggttgttccttttatggttatttcttgatgatatgttaaacaagttttggattatttatgccttctctttttaggccatatagggtaactttctgacattgccatggcatgtttcttttaatttaatttactgttaccttaaattcaggggtacacgtacaggatatgcaggtttgttttataggtaaaagtgtgccatggttttaatgggttttttttttcttgtaaagttgtttaagtttcttgtttactctggatattggcctttgtcagaagaatagattggaaaatctttttcccattctgtagattgtctttcgctctgatggtagtttcttttgctgagcaggagctctttagtttaattagattccattggtcaatttttgcttttgctgcaattgcttttcacgctttcatcatgaaatctgtgcccgtgtttatatcatgaatagtattgccttgatttttttctaggctttttatagtttggggtttttcatttaagtctctaatccatccggagttaattttggataaggtataaggaaggagtccagtttcatttttcagcatatggctagccagttctcccccatcatttattaaattgaaaatcctttccccattgcttgcttttgtcaggtttctaaaagacagatggttgtaggtacaatatgcagtttcttcaagtcatataataccatctgaaatctcttattaattcatttcttttagtatgtatgctggtctcctctgctcactatagtgagggcaccattagccagagaatctgtctgtctagttcatgtaagattctcagaattaagaaaaatggatggcatatgaatgaaacttcatggatgacatatggaatctaatgtgtatttgttgaattaatgcataagatgcaacaagggaaaggttgacaactgcagtgataacctggtattgatgatataagagtctatagatcacagtagaagcaataatcatggaaaacaattggaaatggggaacagccacaaacaagaaagaatcaatactaccaggaaagtgactgcaggtcacttttcctggagcgggtgagagaaaagtggaagttgcagtaactgccgaattcctggttggctgatggaaagatggggcaactgttcactggtacgcagggttttagatgtatgtacctaaggatatgaggtatggcaatgaacagaaattcttttgggaatgagttttagggccattaaaggacatgacctgaagtttcctctgaggccagtccccacaactcaatataaatgtgtttcctgcatatagtcaaagttgccacttctttttcttcatatcatcgatctctgctcttaaagataatcttggttttgcctcaaactgtttgtcactacaaactttccccatgttcctaagtaaaacaggtaactgcctctcaactatatcaagtagactaaaatattgtgtctctaatatcagaaattcagctttaatatattgggtttaactctttgaaatttagagtctccttgaaatacacatgggggtgatttcctaaactttatttcttgtaaggatttatctcaggggtaacacacaaaccagcatcctgaacctctaagtatgaggacagtaagccttaagaatataaaataaactgttcttctctctgccggtggaagtgtgccctgtctattcctgaaattgcttgtttgagacgcatgagacgtgcagcacatgagacacgtgcagcagcctgtggaatattgtcagtgaagaatgtctttgcctgattagatataaagacaagttaaacacagcattagactatagatcaagcctgtgccagacacaaatgacctaatgcccagcacgggccacggaatctcctatcctcttgcttgaacagagcagcacacttctcccccaacactattagatgttctggcataattttgtagatatgtaggatttgacatggactattgttcaatgattcagaggaaatctcctttgttcagataagtacactgactactaaatggattaaaaaacacagtaataaaacccagttttccccttacttccctagtttgtttcttattctgctttcttccaagttgatgctggatagaggtgtttatttctattctaaaaagtgatgaaattggccgggcgcggtggctcacacctgtaatcccagcactttgggaggctgaggtgggcggatcacgaggtcaggagatcaagaccatcctggctaacatggtgaaaccccatctctactaaaaatacaaaaaattagccagagacggtggcgggtgcctgtagtcccagctactcgggaggctgaggcaggagaatggcgtgaacctgggaggcagagctgcagtgagcagagatcgcgccactgcacactccagcctgggtgacaaagcgagactccatctcaaaaaaaaaaaaaaaaaaaaaaagaaagaaagaaagaaaaaaaaagtgatgaaattgtgtattcaatgtagtctcaagagaattgaaaaccaagaaaggctgtggcttcttccacataaagcctggatgaataacaggataacacgttgttacattgtcacaactcctgatccaggaattgatggctaagatattcgtaattcttatccttttcagttgtaacttattcctatttgtcagcattcaggttattagcggctgctggcgaagtccttgagaaataaactgcacactggatggtgggggtagtgtaggaaaatggaggggaaggaagtaaagtttcaaattaagcctgaacagcaaagttcccctgagaaggccacctggattctatcagaaactcgaatgtccatcttgcaaaacttccttgcccaaaccccacccctggagtcacaacccacccttgaccaatagattcatttcactgagggaggcaaagggctggtcaatagattcatttcactgggagaggcaaagggctgggggccagagaggagaagtaaaaagccacacatgaagcagcaatgcaggcatgcttctggctcatctgtgatcaccaggaaactcccagatctgacactgtagtgcatttcactgctgacaagaaggctgctgccaccagcctgtgaagcaaggttaaggtgagaaggctggaggtgagattctgggcaggtaggtactggaagccgggacaaggtgcagaaaggcagaaagtgtttctgaaagagggattagcccgttgtcttacatagtctgactttgcacctgctctgtgattatgactatcccacagtctcctggttgtctacccatggacctagaggtactttgaaagttttggatatctgggctctgactgtgcaataatgggcaaccccaaagtcaaggcacatggcaagaaggtgctgatctccttcggaaaagctgttatgctcacggatgacctcaaaggcacctttgctacactgagtgacctgcactgtaacaagctgcacgtggaccctgagaacttcctggtgagtagtaagtacactcacgctttcttctttacccttagatatttgcactatgggtacttttgaaagcagaggtggctttctcttgtgttatgagtcagctatgggatatgatatttcagcagtgggattttgagagttatgttgctgtaaataacataactaaaatttggtagagcaaggactatgaataatggaaggccacttaccatttgatagctctgaaaaacacatcttataaaaaattctggccaaaatcaaactgagtgttttggatgagggaacagaagttgagatagagaaaataacatctttcctttggtcagcgaaattttctataaaaattaatagtcacttttctgcatagtcctggaggttagaaaaagatcaactgaacaaagtagtgggaagctgttaaaagaggattgtttccctccgaatgatgatggtatacttttgtacgcatggtacaggattctttgttatgagtgtttgggaaaattgtatgtatgtatgtatgtatgtgatgactggggacttatcctatccattactgttccttgaagtactattatcctactttttaaaaggacgaagtctctaaaaaaaaaatgaaacaatcacaatatgttggggtagtgagttggcatagcaagtaagagaaggataggacacaatgggaggtgcagggctgccagtcatattgaagctgatatctagcccataatggtgagagttgctcaaactctggtcaaaaaggatgtaagtgttatatctatttactgcaagtccagcttgaggccttctattcactatgtaccattttcttttttatcttcactccctccccagctcttaggcaacgtgatattgattgttttggcaacccacttcagcgaggattttaccctacagatacaggcttcttggcagtaactaacaaatgctgtggttaatgctgtagcccacaagaccactgagttccctgtccactatgtttgtacctatgtcccaaaatctcatctcctttagatgggggaggttggggagaagagcagtatcctgcctgctgattcagttcctgcatgataaaaatagaataaagaaatatgctctctaagaaatatcattgtactctttttctgtctttatattttaccctgattcagccaaaaggacgcactatttctgatggaaatgagaatgttggagaatgggagtttaaggacagagaagatactttcttgcaatcctgcaagaaaagagagaactcgtgggtggatttagtggggtagttactcctaggaaggggaaatcgtctctagaataagacaatgtttttacagaaagggaggtcaatggaggtactctttggaggtgtaagaggattgttggtagtgtgtagaggtatgttaggactcaaattagaagttctgtataggctattatttgtatgaaactcaggatatagctcatttggtgactgcagttcacttctacttattttaaacaacatattttttatgatttataatgaagtggggatggggcttcctagagaccaatcaagggccaaaccttgaactttctcttaacgtcttcaatggtattaatagagaattatctctaaggcatgtgaactggctgtcttggttttcatctgtacttcatctgctacctctgtgacctgaaacatatttataattccattaagctgtgcatatgatagatttatcatatgtattttccttaaaggatttttgtaagaactaattgaattgatacctgtaaagtctttatcacactacccaataaataataaatctctttgttcagctctctgtttctataaatatgtacaagttttattgtttttagtggtagtgattttattctctttctatatatatacacacacatgtgtgcattcataaatatatacaatttttatgaataaaaaattattagcaatcaatattgaaaaccactgatttttgtttatgtgagcaaacagcagattaaaaggctgagatttaggaaacagcacgttaagtcaagttgatagaggagaatatggacatttaaaagaggcaggatgatataaaattagggaaactggatgcagagaccagatgaagtaagaaaaatagctatcgttttgagcaaaaatcactgaagtttcttgcatatgagagtgacataataaatagggaaacgtagaaaattgattcacatgtatatatatatatagaactgattagacaaagtctaacttgggtatagtcagaggagcttgctgtaattatattgaggtgatggataaagaactgaagttgatggaaacaatgaagttaagaaaaaaaatcgagtaagagaccattgtggcagtgattgcacagaactggaaaacattgtgaaacagagagtcagagatgacagctaaaatccctgtctgtgaatgaaaagaaggaaatttattgacagaacagcaaatgcctacaagccccctgtttggatctggcaatgaacgtagccattctgtggcaatcacttcaaactcctgtacccaagacccttaggaagtatgtagcaccctcaaacctaaaacctcaaagaaagaggttttagaagatataataccctttcttctccagtttcattaatcccaaaacctctttctcaaagtatttcctctatgtgtccaccccaaagagctcacctcaccatatctcttgagtgggagcacatagataggcggtgctaccatctaacagcttctgaaattcctttgtcatatttttgagtccccactaataacccacaaagcagaataaataccagttgctcatgtacaataatcactcaactgctgtcttgtagcatacattaattaagcacattctttgaataattactgtgtccaaacaatcacactttaaaatctcacacttgtgctatcccttgcccttctgaatgtcactctgtattttaaatgaagagatgagggttgaatttcctgtgttacttattgttcatttctcgatgaggagttttcacattcacctttactggaaaacacataagtacacatcttacaggaaaaatataccaaactgacatgtagcatgaatgcttgtgcatgtagtcatataaaatcttgtagcaatgtaaacattctctgatatacacatacagatgtgtctatatgtctacacaatttcttatgctccatgaacaaacattccatgcacacataagaacacacactgttacagatgcatacttgagtgcattgacaaaattaccccagtcaatctagagaatttggatttctgcatttgactctgttagctttgtacatgctgttcatttactctgggtgatgtctttccctcattttgccttgtctatcttgtactcatactttaagtcctaacttatatgttatctcaactaagaagctatttttttttaattttaactgggcttaaagccctgtctataaactctgctacaattatgggctctttcttataatatttagtgtttttcctactaatgtacttaatctgctcattgtatattcctaccactaaattttaacctcttttatggtagagacattgtcttgtaaactcttatttccctagtatttggagatgaaaaaaaagattaaattatccaaaattagatctctcttttctacattatgagtattacactatccatagggaagtttgtttgagacctaaactgaggaacctttggttctaaaatgactatgtgatatcttagtatttataggtcatgaggttccttcctctgcctctgctatagtttgattagtcagcaagcatgtgtcatgcatttattcacatcagaatttcatacactaataagacatagtatcagaagtcagtttattagttatatcagttagggtccatcaaggaaaggacaaaccattatcagttactcaacctagaattaaatacagctcttaatagttaattatccttgtattggaagagctaaaatatcaaataaaggacagtgcagaaatctagatgttagtaacatcagaaaacctcttccgccattaggcctagaagggcagaaggagaaaatgtttataccaccagagtccagaaccagagcccataaccagaggtccactggattcagtgagctagtgggtgctccttggagagagccagaactgtctaatgggggcatcaaagtatcagccataaaaaaccataaaaaagactgtctgctgtaggagatccgttcagagagagagagagaccagaaataatcttgcttatgctttccctcagccagtgtttaccattgcagaatgtacatgcgactgaaagggtgaggaaacctgggaaatgtcagttcctcaaatacagagaacactgagggaaggatgagaaataaatgtgaaagcagacatgaatggtaattgacagaaggaaactaggatgtgtccagtaaatgaataattacagtgtgcagtgattattgcaatgattaatgtattgataagataatatgaaaacacagaattcaaacagcagtgaactgagattagaattgtggagagcactggcatttaagaatgtcacacttagaatgtgtctctaggcattgttctgtgcatatatcatctcaatattcattatctgaaaattatgaattaggtacaaagctcaaataatttattttttcaggttagcaagaactttttttttttttttttctgagatggagcattgctatggttgcccaggctggagtgcaatggcatgatccaggctcactgcaacatctgcctcccaggttcaagcgattctcctgcctcagcctcccaagtagctggcattacaggcatgtgccaccaccatgcctggctaattttctatttttagtagatagggggtttcaccatgttggtcaggctgatctcgaactcctaacatcaggtgatccaccctcctcggcctctgaatgtactgggatcacaggcgtgagccaccacacccagccaagaatgtgaattttgtagaaggatataacccatatttctctgaccctagagtccttagtatacctcccataccatgtggctcatcctccttacatacatttcccatctttcaccctaccttttcctttttgtttcagcttttcactgtgtgtcaaaatctagaaccttatctcctacctgctctgaaaccaacagcaagttgacttccattctaacccacattggcattacactaattaaaatcgatactgagttctaaaatcatctgggattttggggactatgtcttacttcatacttccttgagatttcacattaaatgttggtgttcattaaaggtccttcatttaactttgtattcatcacactcttggattcacagttatatctaaactcttatatatagcctgtataatcccaattcccaagtctgatttctaacctctgacctccaacctcagtgccaaacccatatatcaaacaatgtactgggcttatttatatagatgtcctataggcacctcagactcagcatgggtatttcacttgttatactaaaactgtttctcttccagtgttttccattttagtcattagatagctacttgcccattcaccaaggtcacagattaaaatcatttccctacctctaatcaacagttcaattctgcttcaatttgtccctatctattaatcaccactcttactgcccagtcaggtcctcattgtttcctgaacaagagtagatgctattctttccactttaagaccttatcctggctggatgcggtggctcaggcttgtaaacccagcactttgggaggccgaggcaggcagatcacttgaggtcaggagttcaagaccagcctgaccaacatggtgaaaccccatctctactaaaaatacaaaatcagccgggcgtgtggtgcatgcctgcagtcccagctattcaggtggctgaggcaggagaattgcttgaacccaggaggcggaggttgcggtgagcctagattgcaccattgcactctagcttgggcaatagggatgaaactccatctcagaagagaaaagaaaaaaagaccttattctgttacacaaatcctctcaatgcaatccatatagaataaacatgtaaccagatctcccaatgtgtaaaatcatttcaggtagaacagaattaaagtgaaaagccaagtctttggaattaacagacaaagttcaaataacagtcctcatggccttaagaatttacctaacattttttttagaatcaattttcttatatatgaattggaaacataattcctccctcacaaacacattctaagattttaaggagatattgatgaagtacatcatctgtcatttttaacagttagtggtagtgattcacacagcacattatgatctgttcttgtatgttctgttccattctgtattcttgacctggttgtattctttctgagctccagatccacatatctaagtacatctttttgcattttacaagagtgcatacaatacaatgtatccaagactgtatttctgattttatcgtaccactaaactcacaaatgtggccctattcttgtgttcacgactgacatcaccgtcatggtccaagtctgataatagaaatggcattgtcactttcttccctactgcaacagaagcccagctatttgtctcccattttctctacttctaaaatacatttcttcactaagtgagaataatcttttaaagacacaaatcaaaccatgccaccacctttcttgaattattcaatatctttcgttggcttccaggttacagaaaaataacttgtaacaaagtttaaaggtcattcatggctcctctctaccctattttataacatttccccttgtgatcagaatctcaggcacatcatccatctttctatatacaaataaagtcatatagtttgaactcacctctggttacttttaatcaaccaaatgctgtaaaatgcatttgtatcgctacgtgttaagcagtagttgattcttttcatttcttgttaatattctattctttgactataccgtaatttatcaattctactgttggtaagcatttaagtggctaccggtttgaggtttttatgattattgctgtcataagcatttctatacatgtctttggatacacacatgcatgtgtttctgaatatctaaaaatgtaattgctaggtaatagacttatcaagcatccagcatttgtggatactattaaaggttttccaaaggggttatactattgtacagtgtcaccaacagagtttgagtttctattgatccatatcaccaccaaaatttgaactgtcagtcttatctcttctcttgtctcttttttcctcttttttttccttcccttcccctctcttcgtttcttttctctcctcttctcttctttcctctcttcccttccctttctctttctcttccctatcccttctcctctcctctcccctccttttttctcctctcctctccattatttatttttccttcttctcctccatcccttccatcctctctcttcccctcttccttccttcctttctccatttcttcctcctctttccctcaatccttccttttggatatgctcatgggtgtgtatttgtctgccattgtggcattatttgaattcagaaaagagtgaaaaactactgggatcttcattctgggtctaattccacatttttttttaagaacacactctgtaaaaatgttctgtactagcatattcccaggaacttcgttaaatttaatctggctgaatatggtaaatctactttgcactttgcattctttctttagtcataccataattttaaacattcaaaatatttgtatataatatttgattttatctgtcattaaaatgttaaccttaaaattcatgtttccagaacctatttcaataactggtaaataaacactattcattttttaaatattcttttaatggatatttatttcaatataataaaaaattagagttttattataggaagaatttaccaaaagaaggaggaagcaagcaagtttaaactgcagcaatagttgtccattccaacctctcaaaattcccttggagacaaaatctctagaggcaaagaagaactttatattgagtcaacttgttaaaacatctgcttttagataagttttcttagtataaagtgacagaaacaaataagttaaactctaagatacattccactatattagcctaaaacacttctgcaaaaatgaaactaggaggatatttttagaaacaactgctgaaagagatgcggtggggagatatgcagaggagaacagggtttctgagtcaagacacacatgacagaacagccaatctcagggcaagttaagggaatagtggaatgaaggttcatttttcattctcacaaactaatgaaaccctgcttatcttaaaccaacctgctcactggagcagggaggacaggaccagcataaaaggcagggcagagtcgactgttgcttacactttcttctgacataacagtgttcactagcaacctcaaacagacaccatggtgcatctgactcctgaggagaagactgctgtcaatgccctgtggggcaaagtgaacgtggatgcagttggtggtgaggccctgggcaggttggtatcaaggttataagagaggctcaaggaggcaaatggaaactgggcatgtgtagacagagaagactcttgggtttctgataggcactgactctctgtcccttgggctgttttcctaccctcagattactggtggtctacccttggacccagaggttctttgagtcctttggggatctgtcctctcctgatgctgttatgggcaaccctaaggtgaaggctcatggcaagaaggtgctaggtgcctttagtgatggcctggctcacctggacaacctcaagggcactttttctcagctgagtgagctgcactgtgacaagctgcacgtggatcctgagaacttcagggtgagtccaggagatgcttcacttttctctttttactttctaatcttacattttggttcttttacctacctgctcttctcccacatttttgtcattttactatattttatcatttaatgcttctaaaattttgttaattttttatttaaatattctgcattttttccttcctcacaatcttgctattttaaattatttaatatcctgtctttctctcccaaccccctcccttcatttttccttctctaacaacaactcaaattatgcataccagctctcacctgctaattctgcacttagaataatccttttgtctctccacatgggtatgggagaggctccaactcaaagatgagaggcatagaatactgttttagaggctataaatcattttacaataaggaataattggaattttataaattctgtagtaaatggaatggaaaggaaagtgaatatttgattatgaaagactaggcagttacactggaggtggggcagaagtcgttgctaggagacagcccatcatcacactgattaatcaattaatttgtatctattaatctgtttatagtaattaatttgtatatgctatatacacatacaaaattaaaactaatttggaattaatttgtatatagtattatacagcatatatagcatatatgtacatatatagactacatgctagttaagtacatagaggatgtgtgtgtatagatatatgttatatgtatgcattcatatatgtacttatttatgctgatgggaataacctggggatcagttttgtctaagatttgggcagaaaaaaatgggtgttggctcagtttctcagaagccagtctttatttctctgttaaccatatgcatgtatctgcctacctcttctccgcagctcttgggcaatgtgctggtgtgtgtgctggcccgcaactttggcaaggaattcaccccacaaatgcaggctgcctatcagaaggtggtggctggtgtggctaatgccctggctcacaagtaccattgagatcctggactgtttcctgataaccataagaagaccctatttccctagattctattttctgaacttgggaacacaatgcctacttcaagggtatggcttctgcctaataaagaatgttcagctcaacttcctgattaatttcacttatttcatttttttgtccaggtgtgtaagaaggttcctgaggctctacagatagggagcacttgtttattttacaaagagtacatgggaaaagagaaaagcaagggaaccgtacaaggcattaatgggtgacacttctacctccaaagagcagaaattatcaagaactcttgatacaaagataatactggcactgcagaggttctagggaagacctcaaccctaagacatagcctcaagggtaatagctacgattaaactccaacaattactgagaaaataatgtgctcaattaaaggcataatgattactcaagacaatgttatgttgtctttcttcctccttcctttgcctgcacattgtagcccataatactataccccatcaagtgttcctgctccaagaaatagcttcctcctcttacttgccccagaacatctctgtaaagaatttcctcttatcttcccatatttcagtcaagattcattgctcacgtattacttgtgacctctcttgaccccagccacaataaacttctctatactacccaaaaaatctttccaaaccctccccgacaccatatttttatatttttcttatttatttcatgcacacacacacactccgtgctttataagcaattctgcctattctctaccttcttacaatgcctactgtgcctcatattaaattcatcaatgggcagaaagaaaatatttattcaagaaaacagtgaatgaatgaacgaatgagtaaatgagtaaatgaaggaatgattattccttgctttagaacttctggaattagaggacaatattaataataccatcgcacagtgtttctttgttgttaatgctacaacatacaaagaggaagcatgcagtaaacaaccgaacagttatttcctttctgatcataggagtaatatttttttccttgagcacatttttgccataggtaaaattagaaggatttttagaactttctcagttgtatacatttttaaaaatctgtattatatgcatgttgattaattttaaacttacttgaatacctaaacagaatctgttgtttccttgtgtttgaaagtgctttcacagtaactctgtctgtactgccagaatatactgacaatgtgttatagttaactgttttgatcacaacattttgaattgactggcagcagaagctctttttatatccatgtgttttccttaagtcattatacatagtaggcatgagactctttatactgaataagatatttaggaaccactggtttacatatcagaagcagagctactcagggcattttggggaagatcactttcacattcctgagcatagggaagttctcataagagtaagatattaaaaggagatacttgtgtggtattcgaaagacagtaagagagattgtagaccttatgatcttgatagggaaaacaaactacattcctttctccaaaagtcaaaaaaaaagagcaaatatagcttactataccttctattcctacaccattagaagtagtcagtgagtctaggcaagatgttggccctaaaaatccaaataccagagaattcatgagaacatcacctggatgggacatgtgccgagcaacacaattactatatgctaggcattgctatcttcatattgaagatgaggaggtcaagagatgaaaaaagacttggcaccttgttgttatattaaaattatttgttagagtagagcttttgtaagagtctaggagtgtgggagctaaatgatgatacacatggacacaaagaatagatcaacagacacccaggcctacttgagggttgagggtgggaagagggagacgatgaaaaagaacctattgggtattaagttcatcactgagtgatgaaataatctgtacatcaagacccagtgatatgcaatttacctatataacttgtacatgtacccccaaatttaaaataaagttaaaacaaagtataggaatggaattaattcctcaagatttggctttaattttatttgataatttatcaaatggttgtttttcttttctcactatggcgttgctttataaactatgttcagtatgtctgaatgaaagggtgtgtgtgtgtgtgaaagagagggagagaggaagggaagagaggacgtaataatgtgaatttgagttcatgaaaatttttcaataaaataatttaatgtcaggagaattaagcctaatagtctcctaaatcatccatctcttgagcttcagagcagtcctctgaattaatgcctacatgtttgtaaagggtgttcagactgaagccaagattctacctctaaagagatgcaatctcaaatttatctgaagactgtacctctgctctccataaattgacaccatggcccacttaatgaggttaaaaaaaagctaattctgaatgaaaatctgagcccagtggaggaaatattaatgaacaaggtgcagactgaaatataaattttctgtaataattatgcatatactttagcaaagttctgtctatgttgactttattgcttttggtaagaaatacaactttttaaagtgaactaaactatcctatttccaaactattttgtgtgtgtgcggtttgtttctatgggttctggttttcttggagcatttttatttcattttaattaattaattctgagagctgctgagttgtgtttactgagagattgtgtatctgcgagagaagtctgtagcaagtagctagactgtgcttgacctaggaacatatacagtagattgctaaaatgtctcacttggggaattttagactaaacagtagagcatgtataaaaatactctagtcaagtgctgcttttgaaacaaatgataaaaccacactcccatagatgagtgtcatgattttcatggaggaagttaatattcatcctctaagtatacccagactagggccattctgatataaaacattaggacttaagaaagattaatagactggagtaaaggaaatggacctctgtctctctcgctgtctcttttttgaggacttgtgtgtgtgtgtgtgtgtgtgtgtgtgtgtgttgtggtcagtggggctggaataaaagtagaatagacctgcacctgctgtggcatccattcacagagtagaagcaagctcacaatagtgaagatgtcagtaagcttgaatagtttttcaggaactttgaatgctgatttagatttgaaactgaggctctgaccataaccaaatttgcactatttattgcttcttgaaacttatttgcctggtatgcctgggcttttgatggtcttagtatagcttgcagccttgtccctgcagggtattatgggtaatagaaagaaaagtctgcgttacactctagtcacactaagtaactaccattggaaaagcaacccctgccttgaagccaggatgatggtatctgcagcagttgccaacacaagagaaggatccatagttcatcatttaaaaaagaaaacaaaatagaaaaaggaaaactatttctgagcataagaagttgtagggtaagtctttaagaaggtgacaatttctgccaatcaggatttcaaagctcttgctttgacaattttggtctttcagaatactataaatataacctatattataatttcataaagtctgtgcattttctttgacccaggatatttgcaaaagacatattcaaacttccgcagaacactttatttcacatatacatgcctcttatatcagggatgtgaaacagggtcttgaaaactgtctaaatctaaaacaatgctaatgcaggtttaaatttaataaaataaaatccaaaatctaacagccaagtcaaatctgtatgttttaacatttaaaatattttaaagacgtcttttcccaggattcaacatgtgaaatcttttctcagggatacacgtgtgcctagatcctcattgctttagttttttacagaggaatgaatataaaaagaaaatacttaaattttatccctcttacctctataatcatacataggcataattttttaacctaggctccagatagccatagaagaaccaaacactttctgcgtgtgtgagaataatcagagtgagattttttcacaagtacctgatgagggttgagacaggtagaaaaagtgagagatctctatttatttagcaataatagagaaagcatttaagagaataaagcaatggaaataagaaatttgtaaatttccttctgataactagaaatagaggatccagtttcttttggttaacctaaattttatttcattttattgttttattttattttattttattttattttgtgtaatcgtagtttcagagtgttagagctgaaaggaagaagtaggagaaacatgcaaagtaaaagtataacactttccttactaaaccgactgggtttccaggtaggggcaggattcaggatgactgacagggcccttagggaacactgagaccctacgctgacctcataaatgcttgctacctttgctgttttaattacatcttttaatagcaggaagcagaactctgcacttcaaaagtttttcctcacctgaggagttaatttagtacaaggggaaaaagtacagggggatgggagaaaggcgatcacgttgggaagctatagagaaagaagagtaaattttagtaaaggaggtttaaacaaacaaaatataaagagaaataggaacttgaatcaaggaaatgattttaaaacgcagtattcttagtggactagaggaaaaaaataatctgagccaagtagaagaccttttcccctcctacccctactttctaagtcacagaggctttttgttcccccagacactcttgcagattagtccaggcagaaacagttagatgtccccagttaacctcctatttgacaccactgattaccccattgatagtcacactttgggttgtaagtgactttttatttatttgtatttttgactgcattaagaggtctctagttttttatctcttgtttcccaaaacctaataagtaactaatgcacagagcacattgatttgtatttattctatttttagacataatttattagcatgcatgagcaaattaagaaaaacaacaacaaatgaatgcatatatatgtatatgtatgtgtgtatatatacacatatatatatatattttttttcttttcttaccagaaggttttaatccaaataaggagaagatatgcttagaactgaggtagagttttcatccattctgtcctgtaagtattttgcatattctggagacgcaggaagagatccatctacatatcccaaagctgaattatggtagacaaagctcttccacttttagtgcatcaatttcttatttgtgtaataagaaaattgggaaaacgatcttcaatatgcttaccaagctgtgattccaaatattacgtaaatacacttgcaaaggaggatgtttttagtagcaatttgtactgatggtatggggccaagagatatatcttagagggagggctgagggtttgaagtccaactcctaagccagtgccagaagagccaaggacaggtacggctgtcatcacttagacctcaccctgtggagccacaccctagggttggccaatctactcccaggagcagggagggcaggagccagggctgggcataaaagtcagggcagagccatctattgcttacatttgcttctgacacaactgtgttcactagcaacctcaaacagacaccatggtgcacctgactcctgaggagaagtctgccgttactgccctgtggggcaaggtgaacgtggatgaagttggtggtgaggccctgggcaggttggtatcaaggttacaagacaggtttaaggagaccaatagaaactgggcatgtggagacagagaagactcttgggtttctgataggcactgactctctctgcctattggtctattttcccacccttaggctgctggtggtctacccttggacccagaggttctttgagtcctttggggatctgtccactcctgatgctgttatgggcaaccctaaggtgaaggctcatggcaagaaagtgctcggtgcctttagtgatggcctggctcacctggacaacctcaagggcacctttgccacactgagtgagctgcactgtgacaagctgcacgtggatcctgagaacttcagggtgagtctatgggacccttgatgttttctttccccttcttttctatggttaagttcatgtcataggaaggggagaagtaacagggtacagtttagaatgggaaacagacgaatgattgcatcagtgtggaagtctcaggatcgttttagtttcttttatttgctgttcataacaattgttttcttttgtttaattcttgctttctttttttttcttctccgcaatttttactattatacttaatgccttaacattgtgtataacaaaaggaaatatctctgagatacattaagtaacttaaaaaaaaactttacacagtctgcctagtacattactatttggaatatatgtgtgcttatttgcatattcataatctccctactttattttcttttatttttaattgatacataatcattatacatatttatgggttaaagtgtaatgttttaatatgtgtacacatattgaccaaatcagggtaattttgcatttgtaattttaaaaaatgctttcttcttttaatatacttttttgtttatcttatttctaatactttccctaatctctttctttcagggcaataatgatacaatgtatcatgcctctttgcaccattctaaagaataacagtgataatttctgggttaaggcaatagcaatatttctgcatataaatatttctgcatataaattgtaactgatgtaagaggtttcatattgctaatagcagctacaatccagctaccattctgcttttattttatggttgggataaggctggattattctgagtccaagctaggcccttttgctaatcatgttcatacctcttatcttcctcccacagctcctgggcaacgtgctggtctgtgtgctggcccatcactttggcaaagaattcaccccaccagtgcaggctgcctatcagaaagtggtggctggtgtggctaatgccctggcccacaagtatcactaagctcgctttcttgctgtccaatttctattaaaggttcctttgttccctaagtccaactactaaactgggggatattatgaagggccttgagcatctggattctgcctaataaaaaacatttattttcattgcaatgatgtatttaaattatttctgaatattttactaaaaagggaatgtgggaggtcagtgcatttaaaacataaagaaatgaagagctagttcaaaccttgggaaaatacactatatcttaaactccatgaaagaaggtgaggctgcaaacagctaatgcacattggcaacagccctgatgcctatgccttattcatccctcagaaaaggattcaagtagaggcttgatttggaggttaaagttttgctatgctgtattttacattacttattgttttagctgtcctcatgaatgtcttttcactacccatttgcttatcctgcatctctcagccttgactccactcagttctcttgcttagagataccacctttcccctgaagtgttccttccatgttttacggcgagatggtttctcctcgcctggccactcagccttagttgtctctgttgtcttatagaggtctacttgaagaaggaaaaacagggggcatggtttgactgtcctgtgagcccttcttccctgcctcccccactcacagtgacccggaatctgcagtgctagtctcccggaactatcactctttcacagtctgctttggaaggactgggcttagtatgaaaagttaggactgagaagaatttgaaagggggctttttgtagcttgatattcactactgtcttattaccctatcataggcccaccccaaatggaagtcccattcttcctcaggatgtttaagattagcattcaggaagagatcagaggtctgctggctcccttatcatgtcccttatggtgcttctggctctgcagttattagcatagtgttaccatcaaccaccttaacttcatttttcttattcaatacctaggtaggtagatgctagattctggaaataaaatatgagtctcaagtggtccttgtcctctctcccagtcaaattctgaatctagttggcaagattctgaaatcaaggcatataatcagtaataagtgatgatagaagggtatatagaagaattttattatatgagagggtgaaacctaaaatgaaatgaaatcagacccttgtcttacaccataaacaaaaataaatttgaatgggttaaagaattaaactaagacctaaaaccataaaaatttttaaagaaatcaaaagaagaaaattctaatattcatgttgcagccgttttttgaatttgatatgagaagcaaaggcaacaaaaggaaaaataaagaagtgaggctacatcaaactaaaaaatttccacacaaaaaagaaaacaatgaacaaatgaaaggtgaaccatgaaatggcatatttgcaaaccaaatatttcttaaatattttggttaatatccaaaatatataagaaacacagatgattcaataacaaacaaaaaattaaaaataggaaaataaaaaaattaaaaagaagaaaatcctgccatttatgcgagaattgatgaacctggaggatgtaaaactaagaaaaataagcctgacacaaaaagacaaatactacacaaccttgctcatatgtgaaacataaaaaagtcactctcatggaaacagacagtagaggtatggtttccaggggttgggggtgggagaatcaggaaactattactcaaagggtataaaatttcagttatgtgggatgaataaattctagatatctaatgtacagcatcgtgactgtagttaattgtactgtaagtatatttaaaatttgcaaagagagtagatttttttgtttttttagatggagttttgctcttgttgtccaggctggagtgcaatggcaagatcttggctcactgcaacctccgcctcctgggttcaagcaaatctcctgcctcagcctcccgagtagctgggattacaggcatgcgacaccatgcccagctaattttgtatttttagtagagacggggtttctccatgttggtcaggctgatccgcctcctcggccaccaaagggctgggattacaggcgtgaccaccgggcctggccgagagtagatcttaaaagcatttaccacaagaaaaaggtaactatgtgagataatgggtatgttaattagcttgattgtggtaatcatttcacaaggtatacatatattaaaacatcatgttgtacaccttaaatatatacaatttttatttgtgaatgatacctcaataaagttgaagaataataaaaaagaatagacatcacatgaattaaaaaactaaaaaataaaaaaatgcatcttgatgattagaattgcattcttgatttttcagatacaaatatccatttgactgtttactcttttccaaaacaatacaataaattttagcactttatcttcattttccccttcccaatctataattttatatatatatattttagatattttgtatagttttactccctagattttctagtgttattattaaatagtgaagaaatgtttacacttatgtacaaaatgttttgcatgcttttcttcatttctaacattctctctaagtttattctattttttcctgattatccttaatattatctctttctgctggaaatatattgttacttttggtttatctaaaaatggcttcattttcttcattctaaaatcatgttaaattaataccactcatgtgtaagtaagatagtggaataaatagaaatccaaaaactaaatctcacaaaatataataatgtgatatataaaaatatagcttttaaatttagcttggaaataaaaaacaaacagtaattgaacaactatactttttgaaaagagtaaagtgaaatgcttaactgcatataccacaatcgattacacaattaggtgtgaaggtaaaattcagtcacgaaaaaactagaataaaaatatgggaagacatgtatataatcttagagataacagtgttatttaattatcaacccaaagtagaaactatcaagggagaaataaattcagtcaacaataaaagcatttaagaagttattctaggctgggagcggtggctcacacctgcaattgcagcactttgggaggcctagacaggcggatcacgacgtcaggagttcaagatcagcctggccaacatagtgaaacctcatcgctactaaaaatataaaaacttagcctggcgtggtggcaggcatgtgtaatcccagcaatttgggaggctgaggcaggagaatcgcttgatcctgggaggcagaggttgcagtgagccaagattgtgccactgcattccagcccaggtgacagcatgagactccgtcacaaaaaaaaaagaaaaaaaaggggggggggggcggtggagccaagatgaccgaataggaacagctccagtctatagctcccatcgtgagtgacgcagaagacgggtgatttctgcatttccaactgaggtaccaggttcatctcacagggaagtgccaggcagtgggtgcaggacagtagtgcagtgcactgtgcatgagccgaagcagggcgaggcatcacctcacccgggaagcacaaggggtcagggaattccctttcctagtcaaagaaaagggtgacagatggcacctggaaaatcgggtcactcccgccctaatactgcgctcttccaacaagcttaacaaatggcacaccaggagattatatcccatgcctggctcagagggtcctacgcccatggagcctcgctcattgctagcacagcagtctgaggtcaaactgcaaggtggcagtgaggctgggggaggggtgcccaccattgtccaggcttgagcaggtaaacaaagccgcctggaagctcgaactgggtggagcccaccacagctcaaggaggcctgcctgcctctgtaggctccacctctaggggcagggcacagacaaacaaaagacaacaagaacctctgcagacttaaatgtccctgtctgacagctttgaagagagtagtggttctcccagcacatagcttcagatctgagaacaggcagactgcctcctcaagtgggtccctgacccccgagtagcctaactgggaggcatcccccagtagggcggactgacacctcacatggctggtactcctctaagacaaaacttccagaggaatgatcaggcagcagcatttgcggttcaccaatatccactgttctgcagccaccgctgctgatacccaggaaaacagcatctggagtggacctccagtaaactccaacagacctgcagctgagggtcctgactgttagaaggaaaactaacaaacagaaaggacatccacaccaaaaacccatctgtacatcaccatcatcaaagaccaaaggtagataaaaccataaagatggggaaaaagcagagcagaaaaactggacactctaaaaatgagagtgcctctccttctccaaagtaacgcagctcctcaccagcaatggaacaaagctgggcagagaatgactttgacgagttgagagaggaaggcttcagaagatcaaactactccaagctaaaggaggaagttcgaacaaacggcaaagaagtaaaaaactttgaaaaaaaattagatgaatggataactagaataaccaatgcacagaagtccttaaaggacctgatggagctgaaaaccaaggcaggagaactacgtgacaaatacacaagcctcagtaaccgatgagatcaactggaagaaagggtatcaatgacggaagatgaaatgaatgaaatgaagcatgaagagaagtttagagaaaaaagaataaaaagaaacgaacaaagcctccaagaaatatgggactatgtgaaaagaccaaatctacatctaattggtgtagctgaaagtgatggggagaatggaaccaagttggaaaacactctgcaggatattatccaggagaacttccccaatctagcaaggcagcccaaattcacattcaggaaatacagagaacgccacaaagatactcctagagaaaagcaactccaagacacataactgacagattcaccaaagttgaaatgaaggaaaaaatgttaagggcagccagagagaaaggtcgggttacccacaaagggaagcccatcagactaacagctgatctatcggcagaaactctacaagccagaagaaagtgggggccaatattcaacattgttaaagaaaagaattttcggcccagaatttcatatccagccaaactaagcttcataagcattggagaaataaaatcctttacagacaagcaaatgctgagagattttgtcaccaccaggcctgccctacaagagctcctgaaggaagcactaaacatggaaaggaacaactagtatcagccactgcaaaaacatgccaaattgtaaacgaccatcaaggctaggaagaaactgcatcaaggagcaaaataaccagctaacatcataatgacaggatcaaattcatacataacaatactcaccttaaatgtaaataggctaaatgctccaattaaaagacacagactggcaaattggataaggagtcaagacccatctgtcgttatgtattcaggaaacccatctcacgtgcagagacacacataggctcgaaataaaaggatggaggaatatctaccaagcaaatggaaaacaaaaaaaggcaggggttgcaatcctagtctctgataaaacagattttaaaccaacaaagatcaaaagagacaaagaaggccattacataatggcaaagggatctattcaagaagaagaactaactatactaaatatatatgcacccaatacaggagcacccagattcataaaacaagtcctgagtgacctacaaagagacttagatgcccacacaataataatgggagactttaacaccccactgtcaacattagacagatcaacgagacagaaagttaacaaggatatccaggaattggactcagctctgcaccaagcagacctaatagacatctacagaactctccaccccaaatcaacagaatatacattcttttcagcaccacaccacacctattccaaaactgaccacatagttggaagtaaagctctcctcagcaaatgtaaaagaacagaaactataacaaactgtctctcagaccacagtgcaatcaaactagaactcaggattaagaaactcactcaaaaccactcagctacatggaaactgaacagcctgctcctgaatgactactgggtacataacaaaatgaaggcagaaataaagatgttctttgaaacaacgagaacaaagacacaacacaccagaatctctgagacacattcaaagcagtgtgtagagggaaatttatagcactaaatgcccacaagggaaagcaggaaagatctaaaattgacaccctaacatcacaattaaaaaactagagaagcaggagcaaacacattcaaaagctaacagaagacaagaaataactaagatcagagcagaagtgaagaagatagagacacaaaaaacccttcaaaaaaatcaatgaatccagaagctgtttttttgaaaagatcaacaaaattgatagactgctagcaagactaataaagaagaaaggggagaagaatcaaatagacgcaataaaaaatgacacggggtatcaccactgatcccacagaaatacaaactaccgtcagagaatactataaacacctctacgcaaataaactagaaaatctagaagaaatggataaattcctcgacacatacactctgccaagactaaaccaggaagaagttgtatctctgaatagaccaataacaggctctgaaattgaggcaataattaatagcttatcaaccaaaaaaagtccgggaccagtaggattcatagccgaattctaccagaggtacaaggaggagctggtaccattccttctgaaactattccaatcaatagaaaaagagggaatcctccctaactcattttatgaggccagcatcatcctgataccaaagcctgacagagacacaacaaaaaaagagaatgttacaccaatatccttgatgaacatcgatgcaaaaatcctcaataaaatactggcaaactgaatccagcagcacatcaaaaagcttatcctccatgatcaagtgggcttcatccctgccatgcaaggctggttcaacatacgaaatcaataaacataatccagcatataaacagaaccaaagacacaaaccatatgattatctcaatagatgcagaaaaggcctttgacaaaattcaacaatgcttcatgctaaaaactctcaataaattaggtattgatgggacatatctcaaaataataagagctatctatgacaaacccacagccaatatcatactgagtggacaaaaactggaagcattccctttgaaaactggcacaaggcagggatgccctctctcaccactcctattcaacatagtgttggaagttctggccagggcaatcaggcaggagaaggaaataaagggcattcaattaggaaaagaggaaggtgaaattgtccctgtttgcagatgacatgattgtatatctagaaaaccccattgtctcagcccaaaatctccttaagctgataagcaacttcagcaaagtctcaggatataaaatcagtgtgcaaaaatcacaagtattcctatgcaccaataacagacaaacagagagccaaatcatgagtgaactcccattcacaattgcttcaaagagaataaaatacctaggaatccaacttacaagggatgtgaaggacctcttcaaggagaactacaaaccactgctcaatgaaataaaagaggatacaaacaaatggaagaacattccatgcttatgggtaggaagaatcatatcgtgaaaatggtcatactgcccaaggtaatttatagattcaatgccatccccatcaagctaccaatgactttcttcacagaactggaaaaaactactttaaagttcatatggaatcaaaaaagagcccacatcaccaaggcaatcctaagccaaaagaacaaagctggaggcatcacgctacctgacttcaaactatactacaatgctacggtaaccaaaacagcatggtactggtaccaaaacagagatctagaccaatggaacagaacagagccctcagaaataatgccgcatatctacaactatccgatctttgacaaacctgagagaaacaagcaatggggaaaggattccctatttaataaatggtgctgggaaaactggctagccatatgtagaaagctgaaactggatccttccttacaccttatacaaaaattaattcaagatggattaaagacttaaacattagacctaaaaccataaaaaccctagaaaaaaacctaggcaataccattcaggacataggcatgggcaaggacttcatgtctaaaacaccaaaacgaatggcaacaaaagacaaaatggacaaacgggatctaattaaactaaagagcttctgcacagctaaagaaactaccatcagagtgaacaggcaacctacaaaatgggagaaaatttttgcaatctactcatctgacaaagggctaatatccagaatctacaatgaactcaaacaaatttacaagaaaaaacaaacaaccccatcaaaaagtgggcaaaggatatgaacagacacttctcaaaagaagacatttatgtaatcaaaaaacacatgaaaaaatgctcatcatcactagccatcagagaaatgcaaatcaaaaccacaatgagataccatctcacaccagttagaatggcgatcattaaaaagtcaggaaacaacaggtgctggagaggatgtggagaaacaggaacaacttttacactgttggtgggactgtaaactagttcaaccattgcggaagtcagtgtggcaattcctcaggaatctagaactagaaataccatttgacccagccatcccattactgggtagatacccaaaggattataaatcatgctgctataaagacacatgcacacgtatgtttattgcagcactattcacaatagcaaagacttggaaccaacccaaatgtccaacaacgatagattggattaagaaaatgtggcacatatacaccatggaatactatgcagccataaaaaatgatgagttcatgtcctttgtagggacatggatgaagctggaaactatcattctcagcaaactatcacaaggacaataaaccaaacaccgcatgttctcactcataggtgggaattgaacaatgagaacacatggacacatgaagaggaacatcacactctggggactgttatggggtggggggcaggggcagggatagcactaggagatatacctaatgctaaatgacgagttaatgggtgcagcacaccaacatggcacatgtatacatatataacaaacctgccgttgtgcacatgtaccctaaaacttgaagtataataataaaaaaaagttatcctattaaaactgatctcacacatccgtagagccattatcaagtctttctctttgaaacagacagaaatttagtgttttctcagtcagttaac

What is claimed is:

1. A process for identifying an agent that modulates the activity of a cancer-related gene comprising:
(a) contacting a compound with a cell containing a gene that corresponds to a polynucleotide having a sequence selected from the group consisting of SEQ ID NO: 1-2276 and under conditions promoting the expression of said gene; and
(b) detecting a difference in expression of said gene relative to when said compound is not present
thereby identifying an agent that modulates the activity of a cancer-related gene.

2. The process of claim 1 wherein said gene has a sequence selected from the group consisting of SEQ ID NO: 1-2276.

3. The process of claim 1 wherein the cell is a cancer cell, the sequence is selected from SEQ ID NO: 1-92, 544-809 and 1189-1851 and the difference in expression is a decrease in expression.

4. The process of claim 2 wherein the cell is a cancer cell, the sequence is selected from SEQ ID NO: 1-92, 544-809 and 1189-1851 and the difference in expression is a decrease in expression.

5. The process of claim 3 or 4 wherein the cancer is lung cancer.

6. The process of claim 5 wherein the cell is an adenocarcinoma cell and the sequence is selected from SEQ ID NO: 1-92.

7. The process of claim 5 wherein the cell is a neuroendocrine carcinoma cell and the sequence is selected from SEQ ID NO: 1189-1607.

8. The process of claim 5 wherein the cell is a squamous cell carcinoma cell and the sequence is selected from SEQ ID NO: 1608-1850.

9. The process of claim 1 wherein the cell is a non-cancerous cell, the sequence is selected from SEQ ID NO: 93-543, 810-1188 and 1851-2276 and the difference in expression is an increase in expression.

10. The process of claim 2 wherein the cell is a non-cancerous cell, the sequence is selected from SEQ ID NO: 93-543, 810-1188 and 1851-2276 and the difference in expression is a decrease in expression.

11. The process of claims 1-10 wherein expression is determined for more than one said gene.

12. The process of claims 1-10 wherein expression is determined for at least 5 said genes.

13. The process of claims 1-10 wherein expression is determined for at least 10 said genes.

14. The process of claims 1-10 wherein expression is determined for all said genes of step (a).

15. A process for identifying an anti-neoplastic agent comprising contacting a cell exhibiting neoplastic activity with a compound first identified as a cancer-related gene modulator using a process of one of claims 1-14 and detecting a decrease in said neoplastic activity after said contacting compared to when said contacting does not occur.

16. The process of claim 15 wherein said neoplastic activity is accelerated replication.

17. The process of claim 15 wherein said decrease in neoplastic activity results from the death of the cell.

18. A process for identifying an anti-neoplastic agent comprising administering to an animal exhibiting a cancerous condition an effective amount of an agent first identified according to a process of one of claims 1-17 and detecting a decrease in said cancerous condition.

19. A process for determining the cancerous status of a cell, comprising determining the level of expression in said cell of at least one gene that corresponds to a polynucleotide having a sequence selected from the group consisting of SEQ ID NO: 1-2276 wherein an elevated expression relative to a known non-cancerous cell when the sequence is one of SEQ ID NO: 1-597 or a reduced expression relative to a known non-cancerous cell when the sequence is one of SEQ ID NO: 598-2276 indicates a cancerous state or potentially cancerous state.

20. The process of claim 19 wherein said gene comprises a nucleotide sequence selected from the group consisting of SEQ ID NO: 1-2276

21. The process of claim 19 or 20 wherein said expression is the expression of more than one said gene.

22. The process of claim 19 or 20 wherein said expression is the expression of at least 5 said genes.

23. The process of claim 19 or 20 wherein said expression is the expression of at least 10 said genes.

24. The process of claim 19 or 20 wherein said expression is the expression of all said genes.

25. A process for determining if a test gene is a cancer initiating or facilitating gene comprising contacting a cell expressing said test gene with an agent that decreases the expression of a gene that corresponds to a polynucleotide having a sequence selected from the group consisting of SEQ ID NO: 1-92, 544-809 and 1189-1851 and detecting a decrease in expression of said test gene compared to when said agent is not present, thereby identifying said test gene as being a cancer initiating or facilitating gene.

26. The process of claim 25 wherein the gene determined by said process is an oncogene.

27. The process of claim 25 wherein the gene determined by said process is a cancer facilitating gene.

28. The process of claim 25 wherein said decrease in expression is due to a decrease in copy number of said gene in said cell or a cell derived from said cell.

29. A process for determining if a test gene is a cancer suppressor gene comprising contacting a cell expressing said test gene with an agent that increases the expression of a gene that corresponds to a polynucleotide having a sequence selected from the group consisting of SEQ ID NO: 93-543, 810-1188 and 1851-2276 and detecting a decrease in expression of said test gene compared to when said agent is not present, thereby identifying said test gene as a cancer suppressor gene.

30. The process of claim 29 wherein said increase in expression is due to an increase in copy number of said gene in said cell or a cell derived from said cell.

31. A process for treating cancer comprising contacting a cancerous cell with an agent having activity against an expression product encoded by a gene sequence selected from the group consisting of SEQ ID NO: 1-92, 544-809 and 1189-1851.

32. The process of claim 31 wherein said cancerous cell is contacted in vivo.

33. The process of claim 31 wherein said agent has affinity for said expression product.

34. The process of claim 33 wherein said agent is an antibody.

35. The process of claim 31 wherein said agent is an apoptosis-inducing agent.

36. A method for producing a product comprising identifying an agent according to the process of claims 1-18 wherein said product is the data collected with respect to said agent as a result of said process and wherein said data is sufficient to convey the chemical structure and/or properties of said agent.

37. A process for treating a cancerous condition in an animal afflicted therewith comprising administering to said animal a therapeutically effective amount of an agent first identified as having anti-neoplastic activity using the process of claim 18.

38. A process for protecting an animal against cancer comprising administering to an animal at risk of developing cancer a therapeutically effective amount of an agent first identified as having anti-neoplastic activity using the process of claim 18.

39. The process of claim 37 or 38 wherein said cancer is lung cancer.

40. The process of claim 39 wherein said cancer is adenocarcinoma.

41. The process of claim 39 wherein said cancer is squamous cell carcinoma.

42. The process of claim 39 wherein said cancer is neuroendocrine carcinoma.

43. A process for determining functionally related genes comprising contacting one or more gene sequences selected from the group consisting of the sequences of SEQ ID NO: 1-2276 with an agent that modulates expression of more than one gene in such group and thereby determining a subset of genes of said group.

44. The process of claim 43 wherein said functionally related genes are genes modulating the same metabolic pathway.

45. The process of claim 43 wherein said genes are genes encoding functionally related polypeptides.

46. The process of claim 43 wherein said all of genes are genes whose expression is modulated by the same transcription activator or enhancer sequence.
